(19) United States
(12) Patent Application Publication
(10) Pub. No.: US 2025/0041457 A1
(43) Pub. Date: Feb. 6, 2025

(54) USE OF ADENO-ASSOCIATED VIRAL VECTORS TO CORRECT GENE DEFECTS/ EXPRESS PROTEINS IN HAIR CELLS AND SUPPORTING CELLS IN THE INNER EAR

(71) Applicant: Akouos, Inc., Boston, MA (US)

(72) Inventors: Emmanuel John Simons, Brookline, MA (US); Robert Ng, Newton, MA (US); Danielle Lenz, Brookline, MA (US); Michelle Valero, Revere, MA (US)

(21) Appl. No.: 18/806,641

(22) Filed: Aug. 15, 2024

Related U.S. Application Data
(62) Division of application No. 17/291,931, filed on May 6, 2021.
(60) Provisional application No. 62/888,093, filed on Aug. 16, 2019.
(60) Provisional application No. 62/756,953, filed on Nov. 7, 2018.

(51) Int. Cl. A61K 48/00; A61P 27/16; C12N 15/86

(52) U.S. Cl. CPC A61K 48/0075; A61P 27/16; C12N 15/86

(57) ABSTRACT

Provided herein are compositions that include at least two different nucleic acid vectors that, when introduced into a primate cell, the at least two different vectors undergo concatamerization or homologous recombination with each other, thereby forming a recombined nucleic acid that encodes a full-length target protein (e.g., a supporting cell target protein or a hair cell target protein). Also provided are compositions that include a single AAV vector that, when introduced into a primate cell, a nucleic acid encoding a full-length target protein (e.g., a supporting cell target protein or a hair cell target protein) is generated at the locus of the supporting cell target gene, and the primate expresses the target protein (e.g., a supporting cell target protein or a hair cell target protein).

### CROSS-REFERENCE TO RELATED APPLICATIONS

[0001] This application claims priority to U.S. Provisional Patent Application Ser. No. 62/756,953, filed Nov. 7, 2018, and U.S. Provisional Patent Application Ser. No. 62/888,093, filed Aug. 16, 2019; the entire contents of which are herein incorporated by reference.

### TECHNICAL FIELD

[0002] The present disclosure relates generally to the use of nucleic acids to treat hearing loss in a primate.

### BACKGROUND OF THE INVENTION

[0003] Hearing loss can be conductive (arising from the ear canal or middle ear), sensorineural (arising from the inner ear or auditory nerve), or mixed. Most forms of non-syndromic deafness are associated with permanent hearing loss caused by damage to structures in the inner ear (sensorineural deafness), although some forms may involve changes in the middle ear (conductive hearing loss). The great majority of human sensorineural hearing loss is caused by abnormalities in the hair cells of the organ of Corti in the cochlea (poor hair cell function). The hair cells may be abnormal at birth, or may be damaged during the lifetime of an individual (e.g., as a result of noise trauma or infection).

### SUMMARY

[0004] The present invention is based on the discovery that a composition including at least two different nucleic acid vectors, wherein: each of the at least two different adeno-associated virus (AAV) vectors includes a coding sequence that encodes a different portion of a supporting cell target protein, each of the encoded portions being at least 30 amino acid residues in length, wherein the amino acid sequence of each of the encoded portions may optionally partially overlap with the amino acid sequence of a different one of the encoded portions; no single vector of the at least two different vectors encodes the full-length supporting cell target protein; at least one of the coding sequences includes a nucleotide sequence spanning two neighboring exons of the supporting cell target genomic DNA, and lacks an intronic sequence between the two neighboring exons; and when introduced into a primate cell the at least two different vectors undergo concatamerization or homologous recombination with each other, thereby forming a recombined nucleic acid that encodes a full-length supporting cell target protein.

[0005] Provided herein are compositions that include at least two different nucleic acid vectors, where: each of the at least two different adeno-associated virus (AAV) vectors includes a coding sequence that encodes a different portion of a supporting cell target protein, each of the encoded portions being at least 30 amino acid residues in length, where the amino acid sequence of each of the encoded portions may optionally partially overlap with the amino acid sequence of a different one of the encoded portions; no single vector of the at least two different vectors encodes the full-length supporting cell target protein; at least one of the coding sequences includes a nucleotide sequence spanning two neighboring exons of the supporting cell target genomic DNA, and lacks an intronic sequence between the two neighboring exons; and when introduced into a primate cell the at least two different vectors undergo concatamerization or homologous recombination with each other, thereby forming a recombined nucleic acid that encodes a full-length supporting cell target protein.

[0006] In some embodiments of any of the compositions described herein, the amino acid sequence of one of the encoded portions overlaps with the amino acid sequence of a different one of the encoded portions. In some embodiments of any of the compositions described herein, the amino acid sequence of each of the encoded portions partially overlaps with the amino acid sequence of a different encoded portion. In some embodiments of any of the compositions described herein, the overlapping amino acid sequence is between 30 amino acid residues to about 390 amino acid residues in length.

[0007] In some embodiments of any of the compositions described herein, each of the at least two different vectors includes a different segment of an intron, where the intron includes the nucleotide sequence of an intron that is present in a supporting cell target genomic DNA, and where the two different segments overlap in sequence by at least 100 nucleotides. In some embodiments of any of the compositions described herein, the two different segments overlap in sequence by about 30 nucleotides to about 390 nucleotides.

[0008] In some embodiments of any of the compositions described herein, the nucleotide sequence of each of the at least two different vectors is between about 30 nucleotides to about 390 nucleotides in length. In some embodiments of any of the compositions described herein, the nucleotide sequence of each of the at least two different vectors is between 30 nucleotides to 340 nucleotides in length.

[0009] In some embodiments of any of the compositions described herein, the number of different vectors in the composition is two. In some embodiments of any of the compositions described herein, a first of the two different vectors includes a coding sequence that encodes an N-terminal portion of the supporting cell target protein. In some embodiments of any of the compositions described herein, the N-terminal portion of the supporting cell target protein is between about 30 amino acids to about 390 amino acids in length. In some embodiments of any of the compositions described herein, the N-terminal portion of the supporting cell target protein is between about 30 amino acids to about 340 amino acids in length. In some embodiments of any of the compositions described herein, the first vector further includes one or both of a promoter and a Kozak sequence. In some embodiments of any of the compositions described herein, the first vector includes a promoter that is an inducible promoter, a constitutive promoter, or a tissue-specific promoter.

[0010] In some embodiments of any of the compositions described herein, the second of the two different vectors includes a coding sequence that encodes a C-terminal portion of the supporting cell target protein. In some embodiments of any of the compositions described herein, the C-terminal portion of the supporting cell target protein is between 30 amino acids to about 390 amino acids in length. In some embodiments of any of the compositions described herein, the C-terminal portion of the supporting cell target protein is between 30 amino acids to about 340 amino acids in length. In some embodiments of any of the compositions described herein, the second vector further includes a poly(dA) sequence.

[0011] Also provided herein are compositions that include two different nucleic acid vectors, where: a first nucleic acid vector of the two different nucleic acid vectors includes a promoter, a first coding sequence that encodes an N-terminal portion of a supporting cell target protein positioned 3′ of the promoter, and a splicing donor signal sequence positioned at the 3′ end of the first coding sequence; and a second nucleic acid vector of the two different nucleic acid vectors includes a splicing acceptor signal sequence, a second coding sequence that encodes a C-terminal portion of a supporting cell target protein positioned at the 3′ end of the splicing acceptor signal sequence, and a polyadenylation sequence at the 3′ end of the second coding sequence; where each of the encoded portions is at least 30 amino acid residues in length, where the amino acid sequences of the encoded portions do not overlap, where no single vector of the two different vectors encodes the full-length supporting cell target protein, and, when the coding sequences are transcribed in a primate cell, to produce RNA transcripts, splicing occurs between the splicing donor signal sequence on one transcript and the splicing acceptor signal sequence on the other transcript, thereby forming a recombined RNA molecule that encodes a full-length supporting cell target protein.

[0012] In some embodiments of any of the compositions described herein, at least one of the coding sequences includes a nucleotide sequence spanning two neighboring exons of a supporting cell target genomic DNA, and lacks an intronic sequence between the neighboring exons.

[0013] Also provided herein are compositions that include: a first nucleic acid vector including a promoter, a first coding sequence that encodes an N-terminal portion of a supporting cell target protein positioned 3′ of the promoter, a splicing donor signal sequence positioned at the 3′ end of the first coding sequence, and a first detectable marker gene positioned 3′ of the splicing donor signal sequence; and a second nucleic acid vector, different from the first nucleic acid vector, including a second detectable marker gene, a splicing acceptor signal sequence positioned 3′ of the second detectable marker gene, a second coding sequence that encodes a C-terminal portion of a supporting cell target protein positioned at the 3′ end of the splicing acceptor signal sequence, and a polyadenylation sequence positioned at the 3′ end of the second coding sequence; where each of the encoded portions is at least 30 amino acid residues in length, where the respective amino acid sequences of the encoded portions do not overlap with each other, where no single vector of the two different vectors encodes the full-length supporting cell target protein, and, when the coding sequences are transcribed in a primate cell to produce RNA transcripts, splicing occurs between the splicing donor signal on one transcript and the splicing acceptor signal on the other transcript, thereby forming a recombined RNA molecule that encodes a full-length supporting cell target protein.

[0014] In some embodiments of any of the compositions described herein, at least one of the coding sequences includes a nucleotide sequence spanning two neighboring exons of a supporting cell target genomic DNA, and lacks an intronic sequence between the neighboring exons. In some embodiments of any of the compositions described herein, the first or second detectable marker gene is alkaline phosphatase. In some embodiments of any of the compositions described herein, the first and second detectable marker genes are the same.

[0015] Also provided herein are compositions that include: a first nucleic acid vector including a promoter, a first coding sequence that encodes an N-terminal portion of a supporting cell target protein positioned 3′ to the promoter, a splicing donor signal sequence positioned at the 3′ end of the first coding sequence, and a F1 phage recombinogenic region positioned 3′ to the splicing donor signal sequence; and a second nucleic acid vector, different from the first nucleic acid vector, including a second F1 phage recombinogenic region, a splicing acceptor signal sequence positioned 3′ of the second F1 phage recombinogenic region, a second coding sequence that encodes a C-terminal portion of a supporting cell target protein positioned at the 3′ end of the splicing acceptor signal sequence, and a polyadenylation sequence positioned at the 3′ end of the second coding sequence; where each of the encoded portions is at least 30 amino acid residues in length, where the respective amino acid sequences of the encoded portions do not overlap with each other, where no single vector of the two different vectors encodes the full-length supporting cell target protein, and, when the coding sequences are transcribed in a primate cell to produce RNA transcripts, splicing occurs between the splicing donor signal one transcript and the splicing acceptor signal on the other transcript, thereby forming a recombined RNA molecule that encodes a full-length supporting cell target protein.

[0016] In some embodiments of any of the compositions described herein, at least one of the coding sequences includes a nucleotide sequence spanning two neighboring exons of a supporting cell target genomic DNA, and lacks an intronic sequence between the two neighboring exons.

[0017] Also provided herein are compositions that include a single adeno-associated virus (AAV) vector, where the single AAV vector that includes a nucleic acid sequence that encodes a supporting cell target protein; and when introduced into a primate cell, a nucleic acid encoding a full-length supporting cell target protein is generated at the locus of the supporting cell target gene, and the primate expresses the supporting cell target protein.

[0018] In some embodiments of any of the compositions described herein, the supporting cell target gene is gap junction protein beta 2 (GJB2). In some embodiments of any of the compositions described herein, the supporting cell target gene is solute carrier family 26 member 4 (SLC26A4).

[0019] In some embodiments of any of the compositions described herein, the composition further includes a pharmaceutically acceptable excipient.

[0020] In some embodiments of any of the compositions described herein, the second nucleic acid vector further includes a destabilizing sequence.

[0021] In some embodiments of any of the compositions described herein, the second nucleic acid vector further includes a FKBP12 destabilizing sequence.

[0022] Also provided herein are kits including any of the compositions described herein. In some embodiments of any of the kits described herein, the kit further includes a pre-loaded syringe containing the composition.

[0023] Also provided herein are methods of correcting a supporting cell target gene defect in a supporting cell of an inner ear in a primate that include: administering to the inner ear of the primate a therapeutically effective amount of any of the compositions described herein, where the administering repairs the supporting cell target gene defect in the supporting cell of the inner ear of the primate.

[0024] Also provided herein are methods of increasing the expression level of a supporting cell target protein in a supporting cell of an inner ear of a primate that include: administering to the inner ear of the primate a therapeutically effective amount of any of the compositions described herein, where the administering results in an increase in the expression level of the supporting cell target protein in the supporting cell of the inner ear of the primate.

[0025] In some embodiments of any of the methods described herein, the primate has previously been determined to have a defective supporting cell target gene.

[0026] Also provided herein are methods of treating non-syndromic sensorineural hearing loss in a primate identified as having a defective supporting cell target gene that include: administering to the inner ear of the primate a therapeutically effective amount of any of the compositions described herein.

[0027] In some embodiments of any of the methods described herein, the method further includes, prior to the administering step, determining that the primate has a defective supporting cell target gene.

[0028] Also provided herein are methods of restoring hearing in a primate identified or diagnosed as having hearing loss that include: administering to the inner ear of the primate a therapeutically effective amount of any composition described herein.

[0029] In some embodiments of any of the methods described herein, the method further includes prior to the administering step, determining that the primate has a defective supporting cell target gene.

[0030] Also provided herein are methods of restoring synapses and/or preserving spiral ganglion nerves in a primate identified or diagnosed as having an inner ear disorder that include: administering to the inner ear of the primate a therapeutically effective amount of any composition described herein.

[0031] In some embodiments of any of the methods described herein, the method further includes prior to the administering step, determining that the primate has a defective supporting cell target gene.

[0032] Also provided herein are methods including administering to an inner ear of a primate a therapeutically effective amount of any composition described herein.

[0033] In some embodiments of any of the methods described herein, the primate has been previously identified as having a defective supporting cell target gene.

[0034] Also provided herein are compositions including at least two different nucleic acid vectors, wherein: each of the at least two different adeno-associated virus (AAV) vectors includes a coding sequence that encodes a different portion of a hair cell target protein, each of the encoded portions being at least 30 amino acid residues in length, wherein the amino acid sequence of each of the encoded portions may optionally partially overlap with the amino acid sequence of a different one of the encoded portions; no single vector of the at least two different vectors encodes the full-length hair cell target protein; at least one of the coding sequences includes a nucleotide sequence spanning two neighboring exons of the hair cell target genomic DNA, and lacks an intronic sequence between the two neighboring exons; and when introduced into a primate cell the at least two different vectors undergo concatamerization or homologous recombination with each other, thereby forming a recombined nucleic acid that encodes a full-length hair cell target protein.

[0035] Provided herein are compositions that include at least two different nucleic acid vectors, where: each of the at least two different adeno-associated virus (AAV) vectors includes a coding sequence that encodes a different portion of a hair cell target protein, each of the encoded portions being at least 30 amino acid residues in length, where the amino acid sequence of each of the encoded portions may optionally partially overlap with the amino acid sequence of a different one of the encoded portions; no single vector of the at least two different vectors encodes the full-length protein; at least one of the coding sequences includes a nucleotide sequence spanning two neighboring exons of the hair cell target genomic DNA, and lacks an intronic sequence between the two neighboring exons; and when introduced into a primate cell the at least two different vectors undergo concatamerization or homologous recombination with each other, thereby forming a recombined nucleic acid that encodes a full-length hair cell target protein.

[0036] In some embodiments of any of the compositions described herein, the amino acid sequence of one of the encoded portions overlaps with the amino acid sequence of a different one of the encoded portions. In some embodiments of any of the compositions described herein, the amino acid sequence of each of the encoded portions partially overlaps with the amino acid sequence of a different encoded portion. In some embodiments of any of the compositions described herein, the overlapping amino acid sequence is between 30 amino acid residues to about 390 amino acid residues in length. In some embodiments of any of the compositions described herein, each of the at least two different vectors includes a different segment of an intron, where the intron includes the nucleotide sequence of an intron that is present in a hair cell target genomic DNA, and where the two different segments overlap in sequence by at least 100 nucleotides. In some embodiments of any of the compositions described herein, the two different segments overlap in sequence by about 30 nucleotides to about 390 nucleotides. In some embodiments of any of the compositions described herein, the nucleotide sequence of each of the at least two different vectors is between about 30 nucleotides to about 390 nucleotides in length. In some embodiments of any of the compositions described herein, the nucleotide sequence of each of the at least two different vectors is between 30 nucleotides to 340 nucleotides in length.

[0037] In some embodiments of any of the compositions described herein, the number of different vectors in the composition is two. In some embodiments of any of the compositions described herein, a first of the two different vectors includes a coding sequence that encodes an N-terminal portion of the hair cell target protein. In some embodiments of any of the compositions described herein, the N-terminal portion of the hair cell target protein is between about 30 amino acids to about 390 amino acids in length. In some embodiments of any of the compositions described herein, the N-terminal portion of the hair cell target protein is between about 30 amino acids to about 340 amino acids in length. In some embodiments of any of the compositions described herein, the first vector further includes one or both of a promoter and a Kozak sequence. In some embodiments of any of the compositions described herein, the first vector includes a promoter that is an inducible promoter, a constitutive promoter, or a tissue-specific promoter.

[0038] In some embodiments of any of the compositions described herein, the second of the two different vectors includes a coding sequence that encodes a C-terminal portion of the hair cell target protein. In some embodiments of any of the compositions described herein, the C-terminal portion of the hair cell target protein is between 30 amino acids to about 390 amino acids in length. In some embodiments of any of the compositions described herein, the C-terminal portion of the hair cell target protein is between 30 amino acids to about 340 amino acids in length. In some embodiments of any of the compositions described herein, the second vector further includes a poly(dA) sequence.

[0039] Also provided herein are compositions that include two different nucleic acid vectors, where: a first nucleic acid vector of the two different nucleic acid vectors includes a promoter, a first coding sequence that encodes an N-terminal portion of a hair cell target protein positioned 3′ of the promoter, and a splicing donor signal sequence positioned at the 3′ end of the first coding sequence; and a second nucleic acid vector of the two different nucleic acid vectors includes a splicing acceptor signal sequence, a second coding sequence that encodes a C-terminal portion of a hair cell target protein positioned at the 3′ end of the splicing acceptor signal sequence, and a polyadenylation sequence at the 3′ end of the second coding sequence; where each of the encoded portions is at least 30 amino acid residues in length, where the amino acid sequences of the encoded portions do not overlap, where no single vector of the two different vectors encodes the full-length hair cell target protein, and, when the coding sequences are transcribed in a primate cell, to produce RNA transcripts, splicing occurs between the splicing donor signal sequence on one transcript and the splicing acceptor signal sequence on the other transcript, thereby forming a recombined RNA molecule that encodes a full-length hair cell target protein.

[0040] In some embodiments of any of the compositions described herein, at least one of the coding sequences includes a nucleotide sequence spanning two neighboring exons of a hair cell target genomic DNA, and lacks an intronic sequence between the neighboring exons.

[0041] Also provided herein are compositions that include: a first nucleic acid vector including a promoter, a first coding sequence that encodes an N-terminal portion of a hair cell target protein positioned 3′ of the promoter, a splicing donor signal sequence positioned at the 3′ end of the first coding sequence, and a first detectable marker gene positioned 3′ of the splicing donor signal sequence; and a second nucleic acid vector, different from the first nucleic acid vector, including a second detectable marker gene, a splicing acceptor signal sequence positioned 3′ of the second detectable marker gene, a second coding sequence that encodes a C-terminal portion of a hair cell target protein positioned at the 3′ end of the splicing acceptor signal sequence, and a polyadenylation sequence positioned at the 3′ end of the second coding sequence; where each of the encoded portions is at least 30 amino acid residues in length, where the respective amino acid sequences of the encoded portions do not overlap with each other, where no single vector of the two different vectors encodes the full-length hair cell target protein, and, when the coding sequences are transcribed in a primate cell to produce RNA transcripts, splicing occurs between the splicing donor signal on one transcript and the splicing acceptor signal on the other transcript, thereby forming a recombined RNA molecule that encodes a full-length hair cell target protein.

[0042] In some embodiments of any of the compositions described herein, at least one of the coding sequences includes a nucleotide sequence spanning two neighboring exons of a hair cell target genomic DNA, and lacks an intronic sequence between the neighboring exons. In some embodiments of any of the compositions described herein, the first or second detectable marker gene is alkaline phosphatase. In some embodiments of any of the compositions described herein, the first and second detectable marker genes are the same.

[0043] Also provided herein are compositions that include: a first nucleic acid vector including a promoter, a first coding sequence that encodes an N-terminal portion of a hair cell target protein positioned 3′ to the promoter, a splicing donor signal sequence positioned at the 3′ end of the first coding sequence, and a F1 phage recombinogenic region positioned 3′ to the splicing donor signal sequence; and a second nucleic acid vector, different from the first nucleic acid vector, including a second F1 phage recombinogenic region, a splicing acceptor signal sequence positioned 3′ of the second F1 phage recombinogenic region, a second coding sequence that encodes a C-terminal portion of a hair cell target protein positioned at the 3′ end of the splicing acceptor signal sequence, and a polyadenylation sequence positioned at the 3′ end of the second coding sequence; where each of the encoded portions is at least 30 amino acid residues in length, where the respective amino acid sequences of the encoded portions do not overlap with each other, where no single vector of the two different vectors encodes the full-length hair cell target protein, and, when the coding sequences are transcribed in a primate cell to produce RNA transcripts, splicing occurs between the splicing donor signal one transcript and the splicing acceptor signal on the other transcript, thereby forming a recombined RNA molecule that encodes a full-length hair cell target protein.

[0044] In some embodiments of any of the compositions described herein, at least one of the coding sequences includes a nucleotide sequence spanning two neighboring exons of a hair cell target genomic DNA, and lacks an intronic sequence between the two neighboring exons.

[0045] Also provided herein are compositions that include a single adeno-associated virus (AAV) vector, where the single AAV vector that includes a nucleic acid sequence that encodes a hair cell target protein; and when introduced into a primate cell, a nucleic acid encoding a full-length hair cell target protein is generated at the locus of the hair cell target gene, and the primate expresses the hair cell target protein.

[0046] In some embodiments of any of the compositions described herein, the composition further includes a pharmaceutically acceptable excipient.

[0047] Also provided herein are kits including any of the compositions described herein. In some embodiments of any of the kits described herein, the kit further includes a pre-loaded syringe containing the composition.

[0048] Also provided herein are methods of correcting a hair cell target gene defect in a hair cell of an inner ear in a primate that include: administering to the inner ear of the primate a therapeutically effective amount of any of the compositions described herein, where the administering repairs the hair cell target gene defect in the hair cell of the inner ear of the primate.

[0049] Also provided herein are methods of increasing the expression level of a hair cell target protein in a hair cell of an inner ear of a primate that include: administering to the inner ear of the primate a therapeutically effective amount of any of the compositions described herein, where the administering results in an increase in the expression level of the hair cell target protein in the hair cell of the inner ear of the primate.

[0050] In some embodiments of any of the methods described herein, the primate has previously been determined to have a defective hair cell target gene.

[0051] Also provided herein are methods of treating non-syndromic sensorineural hearing loss in a primate identified as having a defective hair cell target gene that include: administering to the inner ear of the primate a therapeutically effective amount of any of the compositions described herein.

[0052] In some embodiments of any of the methods described herein, the method further includes, prior to the administering step, determining that the primate has a defective hair cell target gene.

[0053] Also provided herein are methods of restoring hearing in a primate identified or diagnosed as having hearing loss that include: administering to the inner ear of the primate a therapeutically effective amount of any composition described herein.

[0054] In some embodiments of any of the methods described herein, the method further includes prior to the administering step, determining that the primate has a defective hair cell target gene.

[0055] Also provided herein are methods of restoring synapses and/or preserving spiral ganglion nerves in a primate identified or diagnosed as having an inner ear disorder that include: administering to the inner ear of the primate a therapeutically effective amount of any composition described herein.

[0056] In some embodiments of any of the methods described herein, the method further includes prior to the administering step, determining that the primate has a defective hair cell target gene.

[0057] Also provided herein are methods including administering to an inner ear of a primate a therapeutically effective amount of any composition described herein.

[0058] In some embodiments of any of the methods described herein, the primate has been previously identified as having a defective hair cell target gene.

[0059] The term “a” and “an” refers to one or to more than one (i.e., at least one) of the grammatical object of the article. By way of example, “an element” encompasses one element and more than one element.

[0060] The term “supporting cell target protein” means a protein that is expressed in a supporting cell in a primate and functionally contributes, at least in part, to the hearing in the primate. Non-limiting examples of supporting cell target proteins include GJB2 and SLC26A4.

[0061] The term “mutation in a supporting cell target gene” refers to a modification in a wildtype supporting cell target gene that results in the production of a supporting cell target protein having one or more of: a deletion in one or more amino acids, one or more amino acid substitutions, and one or more amino acid insertions as compared to the wildtype supporting cell target protein, and/or results in a decrease in the expressed level of the encoded supporting cell target protein in a primate cell as compared to the expressed level of the encoded supporting cell target protein in a primate cell not having a mutation. In some embodiments, a mutation can result in the production of a supporting cell target protein having a deletion in one or more amino acids (e.g., 2, 3, 4, 5, 6, 7, 8, 9, 10, 11, 12, 13, 14, 15 16, 17, 18, 19, or 20 amino acids). In some embodiments, the mutation can result in a frameshift in the supporting cell target gene.

[0062] The term “hair cell target protein” means a protein that is expressed in a hair cell in a primate and functionally contributes, at least in part, to the hearing in the primate.

[0063] Non-limiting examples of hair cell target proteins include tectorin alpha (TECTA), unconventional myson-15 (MYO15A), myosin IIIA (MYO3A), myosin VI (MYO6), myosin VIIA (MYO7A), cadherin related 23 (CDH23), collagen type XI alpha 2 chain (COL11A2), lipoxygenase homology domains 1 (LOXHD1), protocadherin related 15 (PCDH15), whirlin (WIHRN), an otoferlin (OTOF) gene, a trio rho guanine nucleotide exchange factor (TRIO) and f-actin binding protein (TRIOBP) gene, a stereocilin (STRC) gene, a pejvakin (PJVK) gene, a norrin cysteine knot growth factor (NDP) gene, a clarin 1 (CLRN1) gene, a transmembrane channel-like 1 (TMC1) gene, a vascular endothelial growth factor (VEGF) gene, and a heat shock protein family A (Hsp70) member 1A (HSPA1A) gene.

[0064] The term “mutation in a hair cell target gene” refers to a modification in a wildtype hair cell target gene that results in the production of a hair cell target protein having one or more of: a deletion in one or more amino acids, one or more amino acid substitutions, and one or more amino acid insertions as compared to the wildtype hair cell target protein, and/or results in a decrease in the expressed level of the encoded hair cell target protein in a primate cell as compared to the expressed level of the encoded hair cell target protein in a primate cell not having a mutation. In some embodiments, a mutation can result in the production of a hair cell target protein having a deletion in one or more amino acids (e.g., 2, 3, 4, 5, 6, 7, 8, 9, 10, 11, 12, 13, 14, 15 16, 17, 18, 19, or 20 amino acids). In some embodiments, the mutation can result in a frameshift in the hair cell target gene.

[0065] The term “frameshift” is known in the art to encompass any mutation in a coding sequence that results in a shift in the reading frame of the coding sequence. In some embodiments, a frameshift can result in a nonfunctional protein. In some embodiments, a point mutation can be a nonsense mutation (i.e., result in a premature stop codon in an exon of the gene). A nonsense mutation can result in the production of a truncated protein (as compared to a corresponding wildtype protein) that may or may not be functional. In some embodiments, the mutation can result in the loss (or a decrease in the level) of expression of hair cell target mRNA or hair cell target protein or both the mRNA and protein. In some embodiments, the mutation can result in the production of an altered hair cell target protein having a loss or decrease in one or more biological activities (functions) as compared to a wildtype hair cell target protein. In some embodiments, the mutation can result in the loss (or a decrease in the level) of expression of supporting cell target mRNA or supporting cell target protein or both the mRNA and protein. In some embodiments, the mutation can result in the production of an altered supporting cell target protein having a loss or decrease in one or more biological activities (functions) as compared to a wildtype supporting cell target protein.

[0066] In some embodiments, the mutation is an insertion of one or more nucleotides into a hair cell target gene. In some embodiments, the mutation is in a regulatory sequence of the hair cell target gene, i.e., a portion of the gene that is not coding sequence. In some embodiments, a mutation in a regulatory sequence may be in a promoter or enhancer region and prevent or reduce the proper transcription of the hair cell target gene. In some embodiments, the mutation is an insertion of one or more nucleotides into a supporting cell target gene. In some embodiments, the mutation is in a regulatory sequence of the supporting cell target gene, i.e., a portion of the gene that is not coding sequence. In some embodiments, a mutation in a regulatory sequence may be in a promoter or enhancer region and prevent or reduce the proper transcription of the supporting cell target gene. The term “conservative mutation” refers to a mutation that does not change the amino acid encoded at the site of the mutation (due to codon degeneracy).

[0067] Modifications can be introduced into a nucleotide sequence by standard techniques known in the art, such as site-directed mutagenesis and PCR-mediated mutagenesis. Conservative amino acid substitutions are ones in which the amino acid residue is replaced with an amino acid residue having a similar side chain. Families of amino acid residues having similar side chains have been defined in the art. These families include amino acids with basic side chains (e.g., lysine, arginine, and histidine), acidic side chains (e.g., aspartic acid and glutamic acid), uncharged polar side chains (e.g., glycine, asparagine, glutamine, serine, threonine, tyrosine, cysteine, and tryptophan), nonpolar side chains (e.g., alanine, valine, leucine, isoleucine, proline, phenylalanine, and methionine), beta-branched side chains (e.g., threonine, valine, and isoleucine), and aromatic side chains (e.g., tyrosine, phenylalanine, tryptophan, and histidine).

[0068] Unless otherwise specified, a “nucleotide sequence encoding an amino acid sequence” includes all nucleotide sequences that are degenerate versions of each other and thus encode the same amino acid sequence.

[0069] The term “endogenous” refers to any material originating from within an organism, cell, or tissue.

[0070] The term “exogenous” refers to any material introduced from or originating from outside an organism, cell, or tissue that is not produced or does not originate from the same organism, cell, or tissue in which it is being introduced.

[0071] The term “isolated” means altered or removed from the natural state. For example, a nucleic acid or a peptide naturally present in a living animal is not “isolated,” but the same nucleic acid or peptide partially or completely separated from the coexisting materials of its natural state is “isolated.” An isolated nucleic acid or protein can exist in substantially purified form, or can exist in a non-native environment such as, for example, a host cell.

[0072] The term “transfected,” “transformed,” or “transduced” refers to a process by which exogenous nucleic acid is transferred or introduced into a cell. A “transfected,” “transformed,” or “transduced” primate cell is one that has been transfected, transformed or transduced with exogenous nucleic acid.

[0073] The term “expression” refers to the transcription and/or translation of a particular nucleotide sequence encoding a protein.

[0074] The term “transient expression” refers to the expression of a non-integrated coding sequence for a short period of time (e.g., hours or days). The coding sequence that is transiently expressed in a cell (e.g., a primate cell) is lost upon multiple rounds of cell division.

[0075] The term “primate” is intended to include any primate (e.g., a human, a non-human primate (e.g., simian (e.g., a monkey (e.g., a marmoset, a baboon, or a macaque), or an ape (e.g., a gorilla, a gibbon, an orangutan, or a chimpanzee). In some embodiments, the primate has or is at risk of having hearing loss. In some embodiments, the primate has been previously identified as having a mutation in a hair cell target gene (e.g., an OTOF gene, a TRIOBP gene, a STRC gene, a PJVK gene, a NDP gene, a CLRN1 gene, a TMC1 gene, a VEGF gene, or a HSPA1A gene). In some embodiments, the primate has been previously identified as having a mutation in a supporting cell target gene (e.g., a GJB2 gene or a SLC26A4 gene). In some embodiments, the primate has been previously identified as having a mutation in a GJB2 gene. In some embodiments, the primate has been previously identified as having a mutation in a SLC26A4 gene. In some embodiments, the primate has been identified as having a mutation in a hair cell target gene (e.g., an OTOF gene, a TRIOBP gene, a STRC gene, a PJVK gene, a NDP gene, a CLRN1 gene, a TMC1 gene, a VEGF gene, or a HSPA1A gene) and has been diagnosed with hearing loss. In some embodiments, the primate has been identified as having a mutation in a supporting cell target gene (e.g., a GBJ2 gene or a SLC26A4 gene) and has been diagnosed with hearing loss. In some embodiments, the primate has been identified as having hearing loss.

[0076] A treatment is “therapeutically effective” when it results in a reduction in one or more of the number, severity, and frequency of one or more symptoms of a disease state (hearing loss, e.g., non-syndromic sensorineural hearing loss or syndromic sensorineural hearing loss) in a primate. In some embodiments, a therapeutically effective amount of a composition can result in an increase in the expression level of an active target protein (e.g., a supporting cell target protein (e.g., a wildtype, full-length supporting cell target protein or a variant of a supporting cell target protein that has the desired activity) (e.g., as compared to the expression level prior to treatment with the composition) or a hair cell target protein (e.g., a wildtype, full-length hair cell target protein or a variant of a hair cell target protein that has the desired activity) (e.g., as compared to the expression level prior to treatment with the composition)). In some embodiments, a therapeutically effective amount of a composition can result in an increase in the expression level of an active target protein (e.g., an active supporting cell target protein (e.g., a wildtype, full-length supporting cell target protein or active variant) ort an active hair cell target protein (e.g., a wildtype, full-length hair cell target protein or active variant) in a target cell (e.g., a supporting cell or a hair cell). In some embodiments, a therapeutically effective amount of a composition can result in an increase in the expression level of an active target protein (e.g., an active supporting cell target protein (e.g., a wildtype, full-length supporting cell target protein or active variant) or an active hair cell target protein (e.g., a wildtype, full-length hair cell target protein or active variant), and/or an increase in one or more activities of a target protein (e.g., a supporting cell target protein or a hair cell target protein) in a target cell (e.g., as compared to a reference level, such as the level(s) in a primate prior to treatment, the level(s) in a primate having a mutation in a target gene (e.g., a supporting cell target gene or a hair cell target gene), or the level(s) in a primate or a population of primates having hearing loss, e.g., non-syndromic sensorineural hearing loss or syndromic sensorineural hearing loss).

[0077] The term “nucleic acid” or “polynucleotide” refers to deoxyribonucleic acid (DNA) or ribonucleic acid (RNA), or a combination thereof, in either single- or double-stranded form. Unless specifically limited, the term encompasses nucleic acids containing known analogues of natural nucleotides that have similar binding properties as the reference nucleotides. Unless otherwise indicated, a particular nucleic acid sequence also implicitly encompasses complementary sequences as well as the sequence explicitly indicated. In some embodiments of any of the nucleic acids described herein, the nucleic acid is DNA. In some embodiments of any of the nucleic acids described herein, the nucleic acid is RNA.

[0078] The term “active hair cell target protein” means a protein encoded by DNA that, if substituted for both wildtype alleles encoding full-length hair cell target protein in hair cells of what is otherwise a wildtype primate, and if expressed in the hair cells of that primate, results in that primate's having a level of hearing approximating the normal level of hearing of a similar primate that is entirely wildtype. Non-limiting examples of active hair cell target proteins are full-length hair cell target proteins (e.g., any of the full-length hair cell target proteins described herein).

[0079] The term “active supporting cell target protein” means a protein encoded by DNA that, if substituted for both wildtype alleles encoding full-length supporting cell target protein in supporting cells of what is otherwise a wildtype primate, and if expressed in the supporting cells of that primate, results in that primate's having a level of hearing approximating the normal level of hearing of a similar primate that is entirely wildtype. Non-limiting examples of active supporting cell target proteins are full-length supporting cell target proteins (e.g., any of the full-length supporting cell target proteins described herein).

[0080] For example, an active target protein (e.g., an active supporting cell target protein or an active hair cell target protein) can include a sequence of a wildtype, full-length target protein (e.g., a supporting cell target protein (e.g., a wildtype, human, full-length supporting cell target protein) or a hair cell target protein (e.g., a wildtype, human, full-length hair cell target protein) including 1 amino acid substitution to about 160 amino acid substitutions, 1 amino acid substitution to about 155 amino acid substitutions, 1 amino acid substitution to about 150 amino acid substitutions, 1 amino acid substitution to about 145 amino acid substitutions, 1 amino acid substitution to about 140 amino acid substitutions, 1 amino acid substitution to about 135 amino acid substitutions, 1 amino acid substitution to about 130 amino acid substitutions, 1 amino acid substitution to about 125 amino acid substitutions, 1 amino acid substitution to about 120 amino acid substitutions, 1 amino acid substitution to about 115 amino acid substitutions, 1 amino acid substitution to about 110 amino acid substitutions, 1 amino acid substitution to about 105 amino acid substitutions, 1 amino acid substitution to about 100 amino acid substitutions, 1 amino acid substitution to about 95 amino acid substitutions, 1 amino acid substitution to about 90 amino acid substitutions, 1 amino acid substitution to about 85 amino acid substitutions, 1 amino acid substitution to about 80 amino acid substitutions, 1 amino acid substitution to about 75 amino acid substitutions, 1 amino acid substitution to about 70 amino acid substitutions, 1 amino acid substitution to about 65 amino acid substitutions, 1 amino acid substitution to about 60 amino acid substitutions, 1 amino acid substitution to about 55 amino acid substitutions, 1 amino acid substitution to about 50 amino acid substitutions, 1 amino acid substitution to about 45 amino acid substitutions, 1 amino acid substitution to about 40 amino acid substitutions, 1 amino acid substitution to about 35 amino acid substitutions, 1 amino acid substitution to about 30 amino acid substitutions, 1 amino acid substitution to about 25 amino acid substitutions, 1 amino acid substitution to about 20 amino acid substitutions, 1 amino acid substitution to about 15 amino acid substitutions, 1 amino acid substitution to about 10 amino acid substitutions, 1 amino acid substitution to about 9 amino acid substitutions, 1 amino acid substitution to about 8 amino acid substitutions, 1 amino acid substitution to about 7 amino acid substitutions, 1 amino acid substitution to about 6 amino acid substitutions, 1 amino acid substitution to about 5 amino acid substitutions, 1 amino acid substitution to about 4 amino acid substitutions, 1 amino acid substitution to about 3 amino acid substitutions, between about 2 amino acid substitutions to about 160 amino acid substitutions, about 2 amino acid substitutions to about 155 amino acid substitutions, about 2 amino acid substitutions to about 150 amino acid substitutions, about 2 amino acid substitutions to about 145 amino acid substitutions, about 2 amino acid substitutions to about 140 amino acid substitutions, about 2 amino acid substitutions to about 135 amino acid substitutions, about 2 amino acid substitutions to about 130 amino acid substitutions, about 2 amino acid substitutions to about 125 amino acid substitutions, about 2 amino acid substitutions to about 120 amino acid substitutions, about 2 amino acid substitutions to about 115 amino acid substitutions, about 2 amino acid substitutions to about 110 amino acid substitutions, about 2 amino acid substitutions to about 105 amino acid substitutions, about 2 amino acid substitutions to about 100 amino acid substitutions, about 2 amino acid substitutions to about 95 amino acid substitutions, about 2 amino acid substitutions to about 90 amino acid substitutions, about 2 amino acid substitutions to about 85 amino acid substitutions, about 2 amino acid substitutions to about 80 amino acid substitutions, about 2 amino acid substitutions to about 75 amino acid substitutions, about 2 amino acid substitutions to about 70 amino acid substitutions, about 2 amino acid substitutions to about 65 amino acid substitutions, about 2 amino acid substitutions to about 60 amino acid substitutions, about 2 amino acid substitutions to about 55 amino acid substitutions, about 2 amino acid substitutions to about 50 amino acid substitutions, about 2 amino acid substitutions to about 45 amino acid substitutions, about 2 amino acid substitutions to about 40 amino acid substitutions, about 2 amino acid substitutions to about 35 amino acid substitutions, about 2 amino acid substitutions to about 30 amino acid substitutions, about 2 amino acid substitutions to about 25 amino acid substitutions, about 2 amino acid substitutions to about 20 amino acid substitutions, about 2 amino acid substitutions to about 15 amino acid substitutions, about 2 amino acid substitutions to about 10 amino acid substitutions, about 2 amino acid substitutions to about 9 amino acid substitutions, about 2 amino acid substitutions to about 8 amino acid substitutions, about 2 amino acid substitutions to about 7 amino acid substitutions, about 2 amino acid substitutions to about 6 amino acid substitutions, about 2 amino acid substitutions to about 5 amino acid substitutions, about 2 amino acid substitutions to about 4 amino acid substitutions, between about 3 amino acid substitutions to about 160 amino acid substitutions, about 3 amino acid substitutions to about 155 amino acid substitutions, about 3 amino acid substitutions to about 150 amino acid substitutions, about 3 amino acid substitutions to about 145 amino acid substitutions, about 3 amino acid substitutions to about 140 amino acid substitutions, about 3 amino acid substitutions to about 135 amino acid substitutions, about 3 amino acid substitutions to about 130 amino acid substitutions, about 3 amino acid substitutions to about 125 amino acid substitutions, about 3 amino acid substitutions to about 120 amino acid substitutions, about 3 amino acid substitutions to about 115 amino acid substitutions, about 3 amino acid substitutions to about 110 amino acid substitutions, about 3 amino acid substitutions to about 105 amino acid substitutions, about 3 amino acid substitutions to about 100 amino acid substitutions, about 3 amino acid substitutions to about 95 amino acid substitutions, about 3 amino acid substitutions to about 90 amino acid substitutions, about 3 amino acid substitutions to about 85 amino acid substitutions, about 3 amino acid substitutions to about 80 amino acid substitutions, about 3 amino acid substitutions to about 75 amino acid substitutions, about 3 amino acid substitutions to about 70 amino acid substitutions, about 3 amino acid substitutions to about 65 amino acid substitutions, about 3 amino acid substitutions to about 60 amino acid substitutions, about 3 amino acid substitutions to about 55 amino acid substitutions, about 3 amino acid substitutions to about 50 amino acid substitutions, about 3 amino acid substitutions to about 45 amino acid substitutions, about 3 amino acid substitutions to about 40 amino acid substitutions, about 3 amino acid substitutions to about 35 amino acid substitutions, about 3 amino acid substitutions to about 30 amino acid substitutions, about 3 amino acid substitutions to about 25 amino acid substitutions, about 3 amino acid substitutions to about 20 amino acid substitutions, about 3 amino acid substitutions to about 15 amino acid substitutions, about 3 amino acid substitutions to about 10 amino acid substitutions, about 3 amino acid substitutions to about 9 amino acid substitutions, about 3 amino acid substitutions to about 8 amino acid substitutions, about 3 amino acid substitutions to about 7 amino acid substitutions, about 3 amino acid substitutions to about 6 amino acid substitutions, about 3 amino acid substitutions to about 5 amino acid substitutions, between about 4 amino acid substitutions to about 160 amino acid substitutions, about 4 amino acid substitutions to about 155 amino acid substitutions, about 4 amino acid substitutions to about 150 amino acid substitutions, about 4 amino acid substitutions to about 145 amino acid substitutions, about 4 amino acid substitutions to about 140 amino acid substitutions, about 4 amino acid substitutions to about 135 amino acid substitutions, about 4 amino acid substitutions to about 130 amino acid substitutions, about 4 amino acid substitutions to about 125 amino acid substitutions, about 4 amino acid substitutions to about 120 amino acid substitutions, about 4 amino acid substitutions to about 115 amino acid substitutions, about 4 amino acid substitutions to about 110 amino acid substitutions, about 4 amino acid substitutions to about 105 amino acid substitutions, about 4 amino acid substitutions to about 100 amino acid substitutions, about 4 amino acid substitutions to about 95 amino acid substitutions, about 4 amino acid substitutions to about 90 amino acid substitutions, about 4 amino acid substitutions to about 85 amino acid substitutions, about 4 amino acid substitutions to about 80 amino acid substitutions, about 4 amino acid substitutions to about 75 amino acid substitutions, about 4 amino acid substitutions to about 70 amino acid substitutions, about 4 amino acid substitutions to about 65 amino acid substitutions, about 4 amino acid substitutions to about 60 amino acid substitutions, about 4 amino acid substitutions to about 55 amino acid substitutions, about 4 amino acid substitutions to about 50 amino acid substitutions, about 4 amino acid substitutions to about 45 amino acid substitutions, about 4 amino acid substitutions to about 40 amino acid substitutions, about 4 amino acid substitutions to about 35 amino acid substitutions, about 4 amino acid substitutions to about 30 amino acid substitutions, about 4 amino acid substitutions to about 25 amino acid substitutions, about 4 amino acid substitutions to about 20 amino acid substitutions, about 4 amino acid substitutions to about 15 amino acid substitutions, about 4 amino acid substitutions to about 10 amino acid substitutions, about 4 amino acid substitutions to about 9 amino acid substitutions, about 4 amino acid substitutions to about 8 amino acid substitutions, about 4 amino acid substitutions to about 7 amino acid substitutions, about 4 amino acid substitutions to about 6 amino acid substitutions, between about 5 amino acid substitutions to about 160 amino acid substitutions, about 5 amino acid substitutions to about 155 amino acid substitutions, about 5 amino acid substitutions to about 150 amino acid substitutions, about 5 amino acid substitutions to about 145 amino acid substitutions, about 5 amino acid substitutions to about 140 amino acid substitutions, about 5 amino acid substitutions to about 135 amino acid substitutions, about 5 amino acid substitutions to about 130 amino acid substitutions, about 5 amino acid substitutions to about 125 amino acid substitutions, about 5 amino acid substitutions to about 120 amino acid substitutions, about 5 amino acid substitutions to about 115 amino acid substitutions, about 5 amino acid substitutions to about 110 amino acid substitutions, about 5 amino acid substitutions to about 105 amino acid substitutions, about 5 amino acid substitutions to about 100 amino acid substitutions, about 5 amino acid substitutions to about 95 amino acid substitutions, about 5 amino acid substitutions to about 90 amino acid substitutions, about 5 amino acid substitutions to about 85 amino acid substitutions, about 5 amino acid substitutions to about 80 amino acid substitutions, about 5 amino acid substitutions to about 75 amino acid substitutions, about 5 amino acid substitutions to about 70 amino acid substitutions, about 5 amino acid substitutions to about 65 amino acid substitutions, about 5 amino acid substitutions to about 60 amino acid substitutions, about 5 amino acid substitutions to about 55 amino acid substitutions, about 5 amino acid substitutions to about 50 amino acid substitutions, about 5 amino acid substitutions to about 45 amino acid substitutions, about 5 amino acid substitutions to about 40 amino acid substitutions, about 5 amino acid substitutions to about 35 amino acid substitutions, about 5 amino acid substitutions to about 30 amino acid substitutions, about 5 amino acid substitutions to about 25 amino acid substitutions, about 5 amino acid substitutions to about 20 amino acid substitutions, about 5 amino acid substitutions to about 15 amino acid substitutions, about 5 amino acid substitutions to about 10 amino acid substitutions, about 5 amino acid substitutions to about 9 amino acid substitutions, about 5 amino acid substitutions to about 8 amino acid substitutions, about 5 amino acid substitutions to about 7 amino acid substitutions, between about 6 amino acid substitutions to about 160 amino acid substitutions, about 6 amino acid substitutions to about 155 amino acid substitutions, about 6 amino acid substitutions to about 150 amino acid substitutions, about 6 amino acid substitutions to about 145 amino acid substitutions, about 6 amino acid substitutions to about 140 amino acid substitutions, about 6 amino acid substitutions to about 135 amino acid substitutions, about 6 amino acid substitutions to about 130 amino acid substitutions, about 6 amino acid substitutions to about 125 amino acid substitutions, about 6 amino acid substitutions to about 120 amino acid substitutions, about 6 amino acid substitutions to about 115 amino acid substitutions, about 6 amino acid substitutions to about 110 amino acid substitutions, about 6 amino acid substitutions to about 105 amino acid substitutions, about 6 amino acid substitutions to about 100 amino acid substitutions, about 6 amino acid substitutions to about 95 amino acid substitutions, about 6 amino acid substitutions to about 90 amino acid substitutions, about 6 amino acid substitutions to about 85 amino acid substitutions, about 6 amino acid substitutions to about 80 amino acid substitutions, about 6 amino acid substitutions to about 75 amino acid substitutions, about 6 amino acid substitutions to about 70 amino acid substitutions, about 6 amino acid substitutions to about 65 amino acid substitutions, about 6 amino acid substitutions to about 60 amino acid substitutions, about 6 amino acid substitutions to about 55 amino acid substitutions, about 6 amino acid substitutions to about 50 amino acid substitutions, about 6 amino acid substitutions to about 45 amino acid substitutions, about 6 amino acid substitutions to about 40 amino acid substitutions, about 6 amino acid substitutions to about 35 amino acid substitutions, about 6 amino acid substitutions to about 30 amino acid substitutions, about 6 amino acid substitutions to about 25 amino acid substitutions, about 6 amino acid substitutions to about 20 amino acid substitutions, about 6 amino acid substitutions to about 15 amino acid substitutions, about 6 amino acid substitutions to about 10 amino acid substitutions, about 6 amino acid substitutions to about 9 amino acid substitutions, about 6 amino acid substitutions to about 8 amino acid substitutions, between about 7 amino acid substitutions to about 160 amino acid substitutions, about 7 amino acid substitutions to about 155 amino acid substitutions, about 7 amino acid substitutions to about 150 amino acid substitutions, about 7 amino acid substitutions to about 145 amino acid substitutions, about 7 amino acid substitutions to about 140 amino acid substitutions, about 7 amino acid substitutions to about 135 amino acid substitutions, about 7 amino acid substitutions to about 130 amino acid substitutions, about 7 amino acid substitutions to about 125 amino acid substitutions, about 7 amino acid substitutions to about 120 amino acid substitutions, about 7 amino acid substitutions to about 115 amino acid substitutions, about 7 amino acid substitutions to about 110 amino acid substitutions, about 7 amino acid substitutions to about 105 amino acid substitutions, about 7 amino acid substitutions to about 100 amino acid substitutions, about 7 amino acid substitutions to about 95 amino acid substitutions, about 7 amino acid substitutions to about 90 amino acid substitutions, about 7 amino acid substitutions to about 85 amino acid substitutions, about 7 amino acid substitutions to about 80 amino acid substitutions, about 7 amino acid substitutions to about 75 amino acid substitutions, about 7 amino acid substitutions to about 70 amino acid substitutions, about 7 amino acid substitutions to about 65 amino acid substitutions, about 7 amino acid substitutions to about 60 amino acid substitutions, about 7 amino acid substitutions to about 55 amino acid substitutions, about 7 amino acid substitutions to about 50 amino acid substitutions, about 7 amino acid substitutions to about 45 amino acid substitutions, about 7 amino acid substitutions to about 40 amino acid substitutions, about 7 amino acid substitutions to about 35 amino acid substitutions, about 7 amino acid substitutions to about 30 amino acid substitutions, about 7 amino acid substitutions to about 25 amino acid substitutions, about 7 amino acid substitutions to about 20 amino acid substitutions, about 7 amino acid substitutions to about 15 amino acid substitutions, about 7 amino acid substitutions to about 10 amino acid substitutions, about 7 amino acid substitutions to about 9 amino acid substitutions, between about 8 amino acid substitutions to about 160 amino acid substitutions, about 8 amino acid substitutions to about 155 amino acid substitutions, about 8 amino acid substitutions to about 150 amino acid substitutions, about 8 amino acid substitutions to about 145 amino acid substitutions, about 8 amino acid substitutions to about 140 amino acid substitutions, about 8 amino acid substitutions to about 135 amino acid substitutions, about 8 amino acid substitutions to about 130 amino acid substitutions, about 8 amino acid substitutions to about 125 amino acid substitutions, about 8 amino acid substitutions to about 120 amino acid substitutions, about 8 amino acid substitutions to about 115 amino acid substitutions, about 8 amino acid substitutions to about 110 amino acid substitutions, about 8 amino acid substitutions to about 105 amino acid substitutions, about 8 amino acid substitutions to about 100 amino acid substitutions, about 8 amino acid substitutions to about 95 amino acid substitutions, about 8 amino acid substitutions to about 90 amino acid substitutions, about 8 amino acid substitutions to about 85 amino acid substitutions, about 8 amino acid substitutions to about 80 amino acid substitutions, about 8 amino acid substitutions to about 75 amino acid substitutions, about 8 amino acid substitutions to about 70 amino acid substitutions, about 8 amino acid substitutions to about 65 amino acid substitutions, about 8 amino acid substitutions to about 60 amino acid substitutions, about 8 amino acid substitutions to about 55 amino acid substitutions, about 8 amino acid substitutions to about 50 amino acid substitutions, about 8 amino acid substitutions to about 45 amino acid substitutions, about 8 amino acid substitutions to about 40 amino acid substitutions, about 8 amino acid substitutions to about 35 amino acid substitutions, about 8 amino acid substitutions to about 30 amino acid substitutions, about 8 amino acid substitutions to about 25 amino acid substitutions, about 8 amino acid substitutions to about 20 amino acid substitutions, about 8 amino acid substitutions to about 15 amino acid substitutions, about 8 amino acid substitutions to about 10 amino acid substitutions, between about 10 amino acid substitutions to about 160 amino acid substitutions, about 10 amino acid substitutions to about 155 amino acid substitutions, about 10 amino acid substitutions to about 150 amino acid substitutions, about 10 amino acid substitutions to about 145 amino acid substitutions, about 10 amino acid substitutions to about 140 amino acid substitutions, about 10 amino acid substitutions to about 135 amino acid substitutions, about 10 amino acid substitutions to about 130 amino acid substitutions, about 10 amino acid substitutions to about 125 amino acid substitutions, about 10 amino acid substitutions to about 120 amino acid substitutions, about 10 amino acid substitutions to about 115 amino acid substitutions, about 10 amino acid substitutions to about 110 amino acid substitutions, about 10 amino acid substitutions to about 105 amino acid substitutions, about 10 amino acid substitutions to about 100 amino acid substitutions, about 10 amino acid substitutions to about 95 amino acid substitutions, about 10 amino acid substitutions to about 90 amino acid substitutions, about 10 amino acid substitutions to about 85 amino acid substitutions, about 10 amino acid substitutions to about 80 amino acid substitutions, about 10 amino acid substitutions to about 75 amino acid substitutions, about 10 amino acid substitutions to about 70 amino acid substitutions, about 10 amino acid substitutions to about 65 amino acid substitutions, about 10 amino acid substitutions to about 60 amino acid substitutions, about 10 amino acid substitutions to about 55 amino acid substitutions, about 10 amino acid substitutions to about 50 amino acid substitutions, about 10 amino acid substitutions to about 45 amino acid substitutions, about 10 amino acid substitutions to about 40 amino acid substitutions, about 10 amino acid substitutions to about 35 amino acid substitutions, about 10 amino acid substitutions to about 30 amino acid substitutions, about 10 amino acid substitutions to about 25 amino acid substitutions, about 10 amino acid substitutions to about 20 amino acid substitutions, about 10 amino acid substitutions to about 15 amino acid substitutions, between about 15 amino acid substitutions to about 160 amino acid substitutions, about 15 amino acid substitutions to about 155 amino acid substitutions, about 15 amino acid substitutions to about 150 amino acid substitutions, about 15 amino acid substitutions to about 145 amino acid substitutions, about 15 amino acid substitutions to about 140 amino acid substitutions, about 15 amino acid substitutions to about 135 amino acid substitutions, about 15 amino acid substitutions to about 130 amino acid substitutions, about 15 amino acid substitutions to about 125 amino acid substitutions, about 15 amino acid substitutions to about 120 amino acid substitutions, about 15 amino acid substitutions to about 115 amino acid substitutions, about 15 amino acid substitutions to about 110 amino acid substitutions, about 15 amino acid substitutions to about 105 amino acid substitutions, about 15 amino acid substitutions to about 100 amino acid substitutions, about 15 amino acid substitutions to about 95 amino acid substitutions, about 15 amino acid substitutions to about 90 amino acid substitutions, about 15 amino acid substitutions to about 85 amino acid substitutions, about 15 amino acid substitutions to about 80 amino acid substitutions, about 15 amino acid substitutions to about 75 amino acid substitutions, about 15 amino acid substitutions to about 70 amino acid substitutions, about 15 amino acid substitutions to about 65 amino acid substitutions, about 15 amino acid substitutions to about 60 amino acid substitutions, about 15 amino acid substitutions to about 55 amino acid substitutions, about 15 amino acid substitutions to about 50 amino acid substitutions, about 15 amino acid substitutions to about 45 amino acid substitutions, about 15 amino acid substitutions to about 40 amino acid substitutions, about 15 amino acid substitutions to about 35 amino acid substitutions, about 15 amino acid substitutions to about 30 amino acid substitutions, about 15 amino acid substitutions to about 25 amino acid substitutions, about 15 amino acid substitutions to about 20 amino acid substitutions, between about 20 amino acid substitutions to about 160 amino acid substitutions, about 20 amino acid substitutions to about 155 amino acid substitutions, about 20 amino acid substitutions to about 150 amino acid substitutions, about 20 amino acid substitutions to about 145 amino acid substitutions, about 20 amino acid substitutions to about 140 amino acid substitutions, about 20 amino acid substitutions to about 135 amino acid substitutions, about 20 amino acid substitutions to about 130 amino acid substitutions, about 20 amino acid substitutions to about 125 amino acid substitutions, about 20 amino acid substitutions to about 120 amino acid substitutions, about 20 amino acid substitutions to about 115 amino acid substitutions, about 20 amino acid substitutions to about 110 amino acid substitutions, about 20 amino acid substitutions to about 105 amino acid substitutions, about 20 amino acid substitutions to about 100 amino acid substitutions, about 20 amino acid substitutions to about 95 amino acid substitutions, about 20 amino acid substitutions to about 90 amino acid substitutions, about 20 amino acid substitutions to about 85 amino acid substitutions, about 20 amino acid substitutions to about 80 amino acid substitutions, about 20 amino acid substitutions to about 75 amino acid substitutions, about 20 amino acid substitutions to about 70 amino acid substitutions, about 20 amino acid substitutions to about 65 amino acid substitutions, about 20 amino acid substitutions to about 60 amino acid substitutions, about 20 amino acid substitutions to about 55 amino acid substitutions, about 20 amino acid substitutions to about 50 amino acid substitutions, about 20 amino acid substitutions to about 45 amino acid substitutions, about 20 amino acid substitutions to about 40 amino acid substitutions, about 20 amino acid substitutions to about 35 amino acid substitutions, about 20 amino acid substitutions to about 30 amino acid substitutions, about 20 amino acid substitutions to about 25 amino acid substitutions, between about 25 amino acid substitutions to about 160 amino acid substitutions, about 25 amino acid substitutions to about 155 amino acid substitutions, about 25 amino acid substitutions to about 150 amino acid substitutions, about 25 amino acid substitutions to about 145 amino acid substitutions, about 25 amino acid substitutions to about 140 amino acid substitutions, about 25 amino acid substitutions to about 135 amino acid substitutions, about 25 amino acid substitutions to about 130 amino acid substitutions, about 25 amino acid substitutions to about 125 amino acid substitutions, about 25 amino acid substitutions to about 120 amino acid substitutions, about 25 amino acid substitutions to about 115 amino acid substitutions, about 25 amino acid substitutions to about 110 amino acid substitutions, about 25 amino acid substitutions to about 105 amino acid substitutions, about 25 amino acid substitutions to about 100 amino acid substitutions, about 25 amino acid substitutions to about 95 amino acid substitutions, about 25 amino acid substitutions to about 90 amino acid substitutions, about 25 amino acid substitutions to about 85 amino acid substitutions, about 25 amino acid substitutions to about 80 amino acid substitutions, about 25 amino acid substitutions to about 75 amino acid substitutions, about 25 amino acid substitutions to about 70 amino acid substitutions, about 25 amino acid substitutions to about 65 amino acid substitutions, about 25 amino acid substitutions to about 60 amino acid substitutions, about 25 amino acid substitutions to about 55 amino acid substitutions, about 25 amino acid substitutions to about 50 amino acid substitutions, about 25 amino acid substitutions to about 45 amino acid substitutions, about 25 amino acid substitutions to about 40 amino acid substitutions, about 25 amino acid substitutions to about 35 amino acid substitutions, about 25 amino acid substitutions to about 30 amino acid substitutions, between about 30 amino acid substitutions to about 160 amino acid substitutions, about 30 amino acid substitutions to about 155 amino acid substitutions, about 30 amino acid substitutions to about 150 amino acid substitutions, about 30 amino acid substitutions to about 145 amino acid substitutions, about 30 amino acid substitutions to about 140 amino acid substitutions, about 30 amino acid substitutions to about 135 amino acid substitutions, about 30 amino acid substitutions to about 130 amino acid substitutions, about 30 amino acid substitutions to about 125 amino acid substitutions, about 30 amino acid substitutions to about 120 amino acid substitutions, about 30 amino acid substitutions to about 115 amino acid substitutions, about 30 amino acid substitutions to about 110 amino acid substitutions, about 30 amino acid substitutions to about 105 amino acid substitutions, about 30 amino acid substitutions to about 100 amino acid substitutions, about 30 amino acid substitutions to about 95 amino acid substitutions, about 30 amino acid substitutions to about 90 amino acid substitutions, about 30 amino acid substitutions to about 85 amino acid substitutions, about 30 amino acid substitutions to about 80 amino acid substitutions, about 30 amino acid substitutions to about 75 amino acid substitutions, about 30 amino acid substitutions to about 70 amino acid substitutions, about 30 amino acid substitutions to about 65 amino acid substitutions, about 30 amino acid substitutions to about 60 amino acid substitutions, about 30 amino acid substitutions to about 55 amino acid substitutions, about 30 amino acid substitutions to about 50 amino acid substitutions, about 30 amino acid substitutions to about 45 amino acid substitutions, about 30 amino acid substitutions to about 40 amino acid substitutions, about 30 amino acid substitutions to about 35 amino acid substitutions, between about 35 amino acid substitutions to about 160 amino acid substitutions, about 35 amino acid substitutions to about 155 amino acid substitutions, about 35 amino acid substitutions to about 150 amino acid substitutions, about 35 amino acid substitutions to about 145 amino acid substitutions, about 35 amino acid substitutions to about 140 amino acid substitutions, about 35 amino acid substitutions to about 135 amino acid substitutions, about 35 amino acid substitutions to about 130 amino acid substitutions, about 35 amino acid substitutions to about 125 amino acid substitutions, about 35 amino acid substitutions to about 120 amino acid substitutions, about 35 amino acid substitutions to about 115 amino acid substitutions, about 35 amino acid substitutions to about 110 amino acid substitutions, about 35 amino acid substitutions to about 105 amino acid substitutions, about 35 amino acid substitutions to about 100 amino acid substitutions, about 35 amino acid substitutions to about 95 amino acid substitutions, about 35 amino acid substitutions to about 90 amino acid substitutions, about 35 amino acid substitutions to about 85 amino acid substitutions, about 35 amino acid substitutions to about 80 amino acid substitutions, about 35 amino acid substitutions to about 75 amino acid substitutions, about 35 amino acid substitutions to about 70 amino acid substitutions, about 35 amino acid substitutions to about 65 amino acid substitutions, about 35 amino acid substitutions to about 60 amino acid substitutions, about 35 amino acid substitutions to about 55 amino acid substitutions, about 35 amino acid substitutions to about 50 amino acid substitutions, about 35 amino acid substitutions to about 45 amino acid substitutions, about 35 amino acid substitutions to about 40 amino acid substitutions, between about 40 amino acid substitutions to about 160 amino acid substitutions, about 40 amino acid substitutions to about 155 amino acid substitutions, about 40 amino acid substitutions to about 150 amino acid substitutions, about 40 amino acid substitutions to about 145 amino acid substitutions, about 40 amino acid substitutions to about 140 amino acid substitutions, about 40 amino acid substitutions to about 135 amino acid substitutions, about 40 amino acid substitutions to about 130 amino acid substitutions, about 40 amino acid substitutions to about 125 amino acid substitutions, about 40 amino acid substitutions to about 120 amino acid substitutions, about 40 amino acid substitutions to about 115 amino acid substitutions, about 40 amino acid substitutions to about 110 amino acid substitutions, about 40 amino acid substitutions to about 105 amino acid substitutions, about 40 amino acid substitutions to about 100 amino acid substitutions, about 40 amino acid substitutions to about 95 amino acid substitutions, about 40 amino acid substitutions to about 90 amino acid substitutions, about 40 amino acid substitutions to about 85 amino acid substitutions, about 40 amino acid substitutions to about 80 amino acid substitutions, about 40 amino acid substitutions to about 75 amino acid substitutions, about 40 amino acid substitutions to about 70 amino acid substitutions, about 40 amino acid substitutions to about 65 amino acid substitutions, about 40 amino acid substitutions to about 60 amino acid substitutions, about 40 amino acid substitutions to about 55 amino acid substitutions, about 40 amino acid substitutions to about 50 amino acid substitutions, about 40 amino acid substitutions to about 45 amino acid substitutions, between about 45 amino acid substitutions to about 160 amino acid substitutions, about 45 amino acid substitutions to about 155 amino acid substitutions, about 45 amino acid substitutions to about 150 amino acid substitutions, about 45 amino acid substitutions to about 145 amino acid substitutions, about 45 amino acid substitutions to about 140 amino acid substitutions, about 45 amino acid substitutions to about 135 amino acid substitutions, about 45 amino acid substitutions to about 130 amino acid substitutions, about 45 amino acid substitutions to about 125 amino acid substitutions, about 45 amino acid substitutions to about 120 amino acid substitutions, about 45 amino acid substitutions to about 115 amino acid substitutions, about 45 amino acid substitutions to about 110 amino acid substitutions, about 45 amino acid substitutions to about 105 amino acid substitutions, about 45 amino acid substitutions to about 100 amino acid substitutions, about 45 amino acid substitutions to about 95 amino acid substitutions, about 45 amino acid substitutions to about 90 amino acid substitutions, about 45 amino acid substitutions to about 85 amino acid substitutions, about 45 amino acid substitutions to about 80 amino acid substitutions, about 45 amino acid substitutions to about 75 amino acid substitutions, about 45 amino acid substitutions to about 70 amino acid substitutions, about 45 amino acid substitutions to about 65 amino acid substitutions, about 45 amino acid substitutions to about 60 amino acid substitutions, about 45 amino acid substitutions to about 55 amino acid substitutions, about 45 amino acid substitutions to about 50 amino acid substitutions, between about 50 amino acid substitutions to about 160 amino acid substitutions, about 50 amino acid substitutions to about 155 amino acid substitutions, about 50 amino acid substitutions to about 150 amino acid substitutions, about 50 amino acid substitutions to about 145 amino acid substitutions, about 50 amino acid substitutions to about 140 amino acid substitutions, about 50 amino acid substitutions to about 135 amino acid substitutions, about 50 amino acid substitutions to about 130 amino acid substitutions, about 50 amino acid substitutions to about 125 amino acid substitutions, about 50 amino acid substitutions to about 120 amino acid substitutions, about 50 amino acid substitutions to about 115 amino acid substitutions, about 50 amino acid substitutions to about 110 amino acid substitutions, about 50 amino acid substitutions to about 105 amino acid substitutions, about 50 amino acid substitutions to about 100 amino acid substitutions, about 50 amino acid substitutions to about 95 amino acid substitutions, about 50 amino acid substitutions to about 90 amino acid substitutions, about 50 amino acid substitutions to about 85 amino acid substitutions, about 50 amino acid substitutions to about 80 amino acid substitutions, about 50 amino acid substitutions to about 75 amino acid substitutions, about 50 amino acid substitutions to about 70 amino acid substitutions, about 50 amino acid substitutions to about 65 amino acid substitutions, about 50 amino acid substitutions to about 60 amino acid substitutions, about 50 amino acid substitutions to about 55 amino acid substitutions, between about 60 amino acid substitutions to about 160 amino acid substitutions, about 60 amino acid substitutions to about 155 amino acid substitutions, about 60 amino acid substitutions to about 150 amino acid substitutions, about 60 amino acid substitutions to about 145 amino acid substitutions, about 60 amino acid substitutions to about 140 amino acid substitutions, about 60 amino acid substitutions to about 135 amino acid substitutions, about 60 amino acid substitutions to about 130 amino acid substitutions, about 60 amino acid substitutions to about 125 amino acid substitutions, about 60 amino acid substitutions to about 120 amino acid substitutions, about 60 amino acid substitutions to about 115 amino acid substitutions, about 60 amino acid substitutions to about 110 amino acid substitutions, about 60 amino acid substitutions to about 105 amino acid substitutions, about 60 amino acid substitutions to about 100 amino acid substitutions, about 60 amino acid substitutions to about 95 amino acid substitutions, about 60 amino acid substitutions to about 90 amino acid substitutions, about 60 amino acid substitutions to about 85 amino acid substitutions, about 60 amino acid substitutions to about 80 amino acid substitutions, about 60 amino acid substitutions to about 75 amino acid substitutions, about 60 amino acid substitutions to about 70 amino acid substitutions, about 60 amino acid substitutions to about 65 amino acid substitutions, between about 70 amino acid substitutions to about 160 amino acid substitutions, about 70 amino acid substitutions to about 155 amino acid substitutions, about 70 amino acid substitutions to about 150 amino acid substitutions, about 70 amino acid substitutions to about 145 amino acid substitutions, about 70 amino acid substitutions to about 140 amino acid substitutions, about 70 amino acid substitutions to about 135 amino acid substitutions, about 70 amino acid substitutions to about 130 amino acid substitutions, about 70 amino acid substitutions to about 125 amino acid substitutions, about 70 amino acid substitutions to about 120 amino acid substitutions, about 70 amino acid substitutions to about 115 amino acid substitutions, about 70 amino acid substitutions to about 110 amino acid substitutions, about 70 amino acid substitutions to about 105 amino acid substitutions, about 70 amino acid substitutions to about 100 amino acid substitutions, about 70 amino acid substitutions to about 95 amino acid substitutions, about 70 amino acid substitutions to about 90 amino acid substitutions, about 70 amino acid substitutions to about 85 amino acid substitutions, about 70 amino acid substitutions to about 80 amino acid substitutions, about 70 amino acid substitutions to about 75 amino acid substitutions, between about 80 amino acid substitutions to about 160 amino acid substitutions, about 80 amino acid substitutions to about 155 amino acid substitutions, about 80 amino acid substitutions to about 150 amino acid substitutions, about 80 amino acid substitutions to about 145 amino acid substitutions, about 80 amino acid substitutions to about 140 amino acid substitutions, about 80 amino acid substitutions to about 135 amino acid substitutions, about 80 amino acid substitutions to about 130 amino acid substitutions, about 80 amino acid substitutions to about 125 amino acid substitutions, about 80 amino acid substitutions to about 120 amino acid substitutions, about 80 amino acid substitutions to about 115 amino acid substitutions, about 80 amino acid substitutions to about 110 amino acid substitutions, about 80 amino acid substitutions to about 105 amino acid substitutions, about 80 amino acid substitutions to about 100 amino acid substitutions, about 80 amino acid substitutions to about 95 amino acid substitutions, about 80 amino acid substitutions to about 90 amino acid substitutions, about 80 amino acid substitutions to about 85 amino acid substitutions, between about 90 amino acid substitutions to about 160 amino acid substitutions, about 90 amino acid substitutions to about 155 amino acid substitutions, about 90 amino acid substitutions to about 150 amino acid substitutions, about 90 amino acid substitutions to about 145 amino acid substitutions, about 90 amino acid substitutions to about 140 amino acid substitutions, about 90 amino acid substitutions to about 135 amino acid substitutions, about 90 amino acid substitutions to about 130 amino acid substitutions, about 90 amino acid substitutions to about 125 amino acid substitutions, about 90 amino acid substitutions to about 120 amino acid substitutions, about 90 amino acid substitutions to about 115 amino acid substitutions, about 90 amino acid substitutions to about 110 amino acid substitutions, about 90 amino acid substitutions to about 105 amino acid substitutions, about 90 amino acid substitutions to about 100 amino acid substitutions, about 90 amino acid substitutions to about 95 amino acid substitutions, between about 100 amino acid substitutions to about 160 amino acid substitutions, about 100 amino acid substitutions to about 155 amino acid substitutions, about 100 amino acid substitutions to about 150 amino acid substitutions, about 100 amino acid substitutions to about 145 amino acid substitutions, about 100 amino acid substitutions to about 140 amino acid substitutions, about 100 amino acid substitutions to about 135 amino acid substitutions, about 100 amino acid substitutions to about 130 amino acid substitutions, about 100 amino acid substitutions to about 125 amino acid substitutions, about 100 amino acid substitutions to about 120 amino acid substitutions, about 100 amino acid substitutions to about 115 amino acid substitutions, about 100 amino acid substitutions to about 110 amino acid substitutions, about 100 amino acid substitutions to about 105 amino acid substitutions, between about 110 amino acid substitutions to about 160 amino acid substitutions, about 110 amino acid substitutions to about 155 amino acid substitutions, about 110 amino acid substitutions to about 150 amino acid substitutions, about 110 amino acid substitutions to about 145 amino acid substitutions, about 110 amino acid substitutions to about 140 amino acid substitutions, about 110 amino acid substitutions to about 135 amino acid substitutions, about 110 amino acid substitutions to about 130 amino acid substitutions, about 110 amino acid substitutions to about 125 amino acid substitutions, about 110 amino acid substitutions to about 120 amino acid substitutions, about 110 amino acid substitutions to about 115 amino acid substitutions, between about 120 amino acid substitutions to about 160 amino acid substitutions, about 120 amino acid substitutions to about 155 amino acid substitutions, about 120 amino acid substitutions to about 150 amino acid substitutions, about 120 amino acid substitutions to about 145 amino acid substitutions, about 120 amino acid substitutions to about 140 amino acid substitutions, about 120 amino acid substitutions to about 135 amino acid substitutions, about 120 amino acid substitutions to about 130 amino acid substitutions, about 120 amino acid substitutions to about 125 amino acid substitutions, between about 130 amino acid substitutions to about 160 amino acid substitutions, about 130 amino acid substitutions to about 155 amino acid substitutions, about 130 amino acid substitutions to about 150 amino acid substitutions, about 130 amino acid substitutions to about 145 amino acid substitutions, about 130 amino acid substitutions to about 140 amino acid substitutions, about 130 amino acid substitutions to about 135 amino acid substitutions, between about 140 amino acid substitutions to about 160 amino acid substitutions, about 140 amino acid substitutions to about 155 amino acid substitutions, about 140 amino acid substitutions to about 150 amino acid substitutions, about 140 amino acid substitutions to about 145 amino acid substitutions, between about 150 amino acid substitutions to about 160 amino acid substitutions, or about 150 amino acid substitutions to about 155 amino acid substitutions. One skilled in the art would appreciate that amino acids that are conserved between wildtype supporting cell target proteins from different species or wildtype hair cell target proteins from different species can be mutated without losing activity, while those amino acids that are not conserved between wildtype supporting cell target proteins from different species or wildtype hair cell target proteins from different species should not be mutated as they are more likely (than amino acids that are not conserved between different species) to be involved in activity.

[0081] An active target protein (e.g., a supporting cell target protein or a hair cell target protein) can include, e.g., a sequence of a wildtype, full-length target protein (e.g., a supporting cell target protein (e.g., a wildtype, human, full-length supporting cell target protein) or a hair cell target protein (e.g., a wildtype, human, full-length hair cell target protein) that has 1 amino acid to about 50 amino acids, 1 amino acid to about 45 amino acids, 1 amino acid to about 40 amino acids, 1 amino acid to about 35 amino acids, 1 amino acid to about 30 amino acids, 1 amino acid to about 25 amino acids, 1 amino acid to about 20 amino acids, 1 amino acid to about 15 amino acids, 1 amino acid to about 10 amino acids, 1 amino acid to about 9 amino acids, 1 amino acid to about 8 amino acids, 1 amino acid to about 7 amino acids, 1 amino acid to about 6 amino acids, 1 amino acid to about 5 amino acids, 1 amino acid to about 4 amino acids, 1 amino acid to about 3 amino acids, about 2 amino acids to about 50 amino acids, about 2 amino acids to about 45 amino acids, about 2 amino acids to about 40 amino acids, about 2 amino acids to about 35 amino acids, about 2 amino acids to about 30 amino acids, about 2 amino acids to about 25 amino acids, about 2 amino acids to about 20 amino acids, about 2 amino acids to about 15 amino acids, about 2 amino acids to about 10 amino acids, about 2 amino acids to about 9 amino acids, about 2 amino acids to about 8 amino acids, about 2 amino acids to about 7 amino acids, about 2 amino acids to about 6 amino acids, about 2 amino acids to about 5 amino acids, about 2 amino acids to about 4 amino acids, about 3 amino acids to about 50 amino acids, about 3 amino acids to about 45 amino acids, about 3 amino acids to about 40 amino acids, about 3 amino acids to about 35 amino acids, about 3 amino acids to about 30 amino acids, about 3 amino acids to about 25 amino acids, about 3 amino acids to about 20 amino acids, about 3 amino acids to about 15 amino acids, about 3 amino acids to about 10 amino acids, about 3 amino acids to about 9 amino acids, about 3 amino acids to about 8 amino acids, about 3 amino acids to about 7 amino acids, about 3 amino acids to about 6 amino acids, about 3 amino acids to about 5 amino acids, about 4 amino acids to about 50 amino acids, about 4 amino acids to about 45 amino acids, about 4 amino acids to about 40 amino acids, about 4 amino acids to about 35 amino acids, about 4 amino acids to about 30 amino acids, about 4 amino acids to about 25 amino acids, about 4 amino acids to about 20 amino acids, about 4 amino acids to about 15 amino acids, about 4 amino acids to about 10 amino acids, about 4 amino acids to about 9 amino acids, about 4 amino acids to about 8 amino acids, about 4 amino acids to about 7 amino acids, about 4 amino acids to about 6 amino acids, about 5 amino acids to about 50 amino acids, about 5 amino acids to about 45 amino acids, about 5 amino acids to about 40 amino acids, about 5 amino acids to about 35 amino acids, about 5 amino acids to about 30 amino acids, about 5 amino acids to about 25 amino acids, about 5 amino acids to about 20 amino acids, about 5 amino acids to about 15 amino acids, about 5 amino acids to about 10 amino acids, about 5 amino acids to about 9 amino acids, about 5 amino acids to about 8 amino acids, about 5 amino acids to about 7 amino acids, about 6 amino acids to about 50 amino acids, about 6 amino acids to about 45 amino acids, about 6 amino acids to about 40 amino acids, about 6 amino acids to about 35 amino acids, about 6 amino acids to about 30 amino acids, about 6 amino acids to about 25 amino acids, about 6 amino acids to about 20 amino acids, about 6 amino acids to about 15 amino acids, about 6 amino acids to about 10 amino acids, about 6 amino acids to about 9 amino acids, about 6 amino acids to about 8 amino acids, about 7 amino acids to about 50 amino acids, about 7 amino acids to about 45 amino acids, about 7 amino acids to about 40 amino acids, about 7 amino acids to about 35 amino acids, about 7 amino acids to about 30 amino acids, about 7 amino acids to about 25 amino acids, about 7 amino acids to about 20 amino acids, about 7 amino acids to about 15 amino acids, about 7 amino acids to about 10 amino acids, about 7 amino acids to about 9 amino acids, about 8 amino acids to about 50 amino acids, about 8 amino acids to about 45 amino acids, about 8 amino acids to about 40 amino acids, about 8 amino acids to about 35 amino acids, about 8 amino acids to about 30 amino acids, about 8 amino acids to about 25 amino acids, about 8 amino acids to about 20 amino acids, about 8 amino acids to about 15 amino acids, about 8 amino acids to about 10 amino acids, about 10 amino acids to about 50 amino acids, about 10 amino acids to about 45 amino acids, about 10 amino acids to about 40 amino acids, about 10 amino acids to about 35 amino acids, about 10 amino acids to about 30 amino acids, about 10 amino acids to about 25 amino acids, about 10 amino acids to about 20 amino acids, about 10 amino acids to about 15 amino acids, about 15 amino acids to about 50 amino acids, about 15 amino acids to about 45 amino acids, about 15 amino acids to about 40 amino acids, about 15 amino acids to about 35 amino acids, about 15 amino acids to about 30 amino acids, about 15 amino acids to about 25 amino acids, about 15 amino acids to about 20 amino acids, about 20 amino acids to about 50 amino acids, about 20 amino acids to about 45 amino acids, about 20 amino acids to about 40 amino acids, about 20 amino acids to about 35 amino acids, about 20 amino acids to about 30 amino acids, about 20 amino acids to about 25 amino acids, about 25 amino acids to about 50 amino acids, about 25 amino acids to about 45 amino acids, about 25 amino acids to about 40 amino acids, about 25 amino acids to about 35 amino acids, about 25 amino acids to about 30 amino acids, about 30 amino acids to about 50 amino acids, about 30 amino acids to about 45 amino acids, about 30 amino acids to about 40 amino acids, about 30 amino acids to about 35 amino acids, about 35 amino acids to about 50 amino acids, about 35 amino acids to about 45 amino acids, about 35 amino acids to about 40 amino acids, about 40 amino acids to about 50 amino acids, about 40 amino acids to about 45 amino acids, about 45 amino acids to about 50 amino acids, deleted. In some embodiments where two or more amino acids are deleted from the sequence of a wildtype, full-length hair cell target protein, the two or more deleted amino acids can be contiguous in the sequence of the wildtype, full-length protein. In other examples where two or more amino acids are deleted from the sequence of a wildtype, full-length hair cell target protein, the two or more deleted amino acids are not contiguous in the sequence of the wildtype, full-length protein. One skilled in the art would appreciate that amino acids that are not conserved between wildtype, full-length hair cell target proteins from different species can be deleted without losing activity, while those amino acids that are conserved between wildtype, full-length hair cell target proteins from different species should not be deleted as they are more likely (than amino acids that are not conserved between different species) to be involved in activity.

[0082] In some embodiments where two or more amino acids are deleted from the sequence of a wildtype, full-length supporting cell target protein, the two or more deleted amino acids can be contiguous in the sequence of the wildtype, full-length protein. In other examples where two or more amino acids are deleted from the sequence of a wildtype, full-length supporting cell target protein, the two or more deleted amino acids are not contiguous in the sequence of the wildtype, full-length protein. One skilled in the art would appreciate that amino acids that are not conserved between wildtype, full-length supporting cell target proteins from different species can be deleted without losing activity, while those amino acids that are conserved between wildtype, full-length supporting cell target proteins from different species should not be deleted as they are more likely (than amino acids that are not conserved between different species) to be involved in activity.

[0083] In some examples, an active target protein (e.g., a supporting cell target protein or a hair cell target protein) can, e.g., include a sequence of a wildtype, full-length target protein (e.g., a wildtype, full-length supporting cell target protein or a wildtype, full-length hair cell target protein) that has between 1 amino acid to about 100 amino acids, 1 amino acid to about 95 amino acids, 1 amino acid to about 90 amino acids, 1 amino acid to about 85 amino acids, 1 amino acid to about 80 amino acids, 1 amino acid to about 75 amino acids, 1 amino acid to about 70 amino acids, 1 amino acid to about 65 amino acids, 1 amino acid to about 60 amino acids, 1 amino acid to about 55 amino acids, 1 amino acid to about 50 amino acids, 1 amino acid to about 45 amino acids, 1 amino acid to about 40 amino acids, 1 amino acid to about 35 amino acids, 1 amino acid to about 30 amino acids, 1 amino acid to about 25 amino acids, 1 amino acid to about 20 amino acids, 1 amino acid to about 15 amino acids, 1 amino acid to about 10 amino acids, 1 amino acid to about 9 amino acids, 1 amino acid to about 8 amino acids, 1 amino acid to about 7 amino acids, 1 amino acid to about 6 amino acids, 1 amino acid to about 5 amino acids, 1 amino acid to about 4 amino acids, 1 amino acid to about 3 amino acids, about 2 amino acids to about 100 amino acids, about 2 amino acid to about 95 amino acids, about 2 amino acids to about 90 amino acids, about 2 amino acids to about 85 amino acids, about 2 amino acids to about 80 amino acids, about 2 amino acids to about 75 amino acids, about 2 amino acids to about 70 amino acids, about 2 amino acids to about 65 amino acids, about 2 amino acids to about 60 amino acids, about 2 amino acids to about 55 amino acids, about 2 amino acids to about 50 amino acids, about 2 amino acids to about 45 amino acids, about 2 amino acids to about 40 amino acids, about 2 amino acids to about 35 amino acids, about 2 amino acids to about 30 amino acids, about 2 amino acids to about 25 amino acids, about 2 amino acids to about 20 amino acids, about 2 amino acids to about 15 amino acids, about 2 amino acids to about 10 amino acids, about 2 amino acids to about 9 amino acids, about 2 amino acids to about 8 amino acids, about 2 amino acids to about 7 amino acids, about 2 amino acids to about 6 amino acids, about 2 amino acids to about 5 amino acids, about 2 amino acids to about 4 amino acids, about 3 amino acids to about 100 amino acids, about 3 amino acid to about 95 amino acids, about 3 amino acids to about 90 amino acids, about 3 amino acids to about 85 amino acids, about 3 amino acids to about 80 amino acids, about 3 amino acids to about 75 amino acids, about 3 amino acids to about 70 amino acids, about 3 amino acids to about 65 amino acids, about 3 amino acids to about 60 amino acids, about 3 amino acids to about 55 amino acids, about 3 amino acids to about 50 amino acids, about 3 amino acids to about 45 amino acids, about 3 amino acids to about 40 amino acids, about 3 amino acids to about 35 amino acids, about 3 amino acids to about 30 amino acids, about 3 amino acids to about 25 amino acids, about 3 amino acids to about 20 amino acids, about 3 amino acids to about 15 amino acids, about 3 amino acids to about 10 amino acids, about 3 amino acids to about 9 amino acids, about 3 amino acids to about 8 amino acids, about 3 amino acids to about 7 amino acids, about 3 amino acids to about 6 amino acids, about 3 amino acids to about 5 amino acids, about 4 amino acids to about 100 amino acids, about 4 amino acid to about 95 amino acids, about 4 amino acids to about 90 amino acids, about 4 amino acids to about 85 amino acids, about 4 amino acids to about 80 amino acids, about 4 amino acids to about 75 amino acids, about 4 amino acids to about 70 amino acids, about 4 amino acids to about 65 amino acids, about 4 amino acids to about 60 amino acids, about 4 amino acids to about 55 amino acids, about 4 amino acids to about 50 amino acids, about 4 amino acids to about 45 amino acids, about 4 amino acids to about 40 amino acids, about 4 amino acids to about 35 amino acids, about 4 amino acids to about 30 amino acids, about 4 amino acids to about 25 amino acids, about 4 amino acids to about 20 amino acids, about 4 amino acids to about 15 amino acids, about 4 amino acids to about 10 amino acids, about 4 amino acids to about 9 amino acids, about 4 amino acids to about 8 amino acids, about 4 amino acids to about 7 amino acids, about 4 amino acids to about 6 amino acids, about 5 amino acids to about 100 amino acids, about 5 amino acid to about 95 amino acids, about 5 amino acids to about 90 amino acids, about 5 amino acids to about 85 amino acids, about 5 amino acids to about 80 amino acids, about 5 amino acids to about 75 amino acids, about 5 amino acids to about 70 amino acids, about 5 amino acids to about 65 amino acids, about 5 amino acids to about 60 amino acids, about 5 amino acids to about 55 amino acids, about 5 amino acids to about 50 amino acids, about 5 amino acids to about 45 amino acids, about 5 amino acids to about 40 amino acids, about 5 amino acids to about 35 amino acids, about 5 amino acids to about 30 amino acids, about 5 amino acids to about 25 amino acids, about 5 amino acids to about 20 amino acids, about 5 amino acids to about 15 amino acids, about 5 amino acids to about 10 amino acids, about 5 amino acids to about 9 amino acids, about 5 amino acids to about 8 amino acids, about 5 amino acids to about 7 amino acids, about 6 amino acids to about 100 amino acids, about 6 amino acid to about 95 amino acids, about 6 amino acids to about 90 amino acids, about 6 amino acids to about 85 amino acids, about 6 amino acids to about 80 amino acids, about 6 amino acids to about 75 amino acids, about 6 amino acids to about 70 amino acids, about 6 amino acids to about 65 amino acids, about 6 amino acids to about 60 amino acids, about 6 amino acids to about 55 amino acids, about 6 amino acids to about 50 amino acids, about 6 amino acids to about 45 amino acids, about 6 amino acids to about 40 amino acids, about 6 amino acids to about 35 amino acids, about 6 amino acids to about 30 amino acids, about 6 amino acids to about 25 amino acids, about 6 amino acids to about 20 amino acids, about 6 amino acids to about 15 amino acids, about 6 amino acids to about 10 amino acids, about 6 amino acids to about 9 amino acids, about 6 amino acids to about 8 amino acids, about 7 amino acids to about 100 amino acids, about 7 amino acid to about 95 amino acids, about 7 amino acids to about 90 amino acids, about 7 amino acids to about 85 amino acids, about 7 amino acids to about 80 amino acids, about 7 amino acids to about 75 amino acids, about 7 amino acids to about 70 amino acids, about 7 amino acids to about 65 amino acids, about 7 amino acids to about 60 amino acids, about 7 amino acids to about 55 amino acids, about 7 amino acids to about 50 amino acids, about 7 amino acids to about 45 amino acids, about 7 amino acids to about 40 amino acids, about 7 amino acids to about 35 amino acids, about 7 amino acids to about 30 amino acids, about 7 amino acids to about 25 amino acids, about 7 amino acids to about 20 amino acids, about 7 amino acids to about 15 amino acids, about 7 amino acids to about 10 amino acids, about 7 amino acids to about 9 amino acids, about 8 amino acids to about 100 amino acids, about 8 amino acid to about 95 amino acids, about 8 amino acids to about 90 amino acids, about 8 amino acids to about 85 amino acids, about 8 amino acids to about 80 amino acids, about 8 amino acids to about 75 amino acids, about 8 amino acids to about 70 amino acids, about 8 amino acids to about 65 amino acids, about 8 amino acids to about 60 amino acids, about 8 amino acids to about 55 amino acids, about 8 amino acids to about 50 amino acids, about 8 amino acids to about 45 amino acids, about 8 amino acids to about 40 amino acids, about 8 amino acids to about 35 amino acids, about 8 amino acids to about 30 amino acids, about 8 amino acids to about 25 amino acids, about 8 amino acids to about 20 amino acids, about 8 amino acids to about 15 amino acids, about 8 amino acids to about 10 amino acids, about 10 amino acids to about 100 amino acids, about 10 amino acid to about 95 amino acids, about 10 amino acids to about 90 amino acids, about 10 amino acids to about 85 amino acids, about 10 amino acids to about 80 amino acids, about 10 amino acids to about 75 amino acids, about 10 amino acids to about 70 amino acids, about 10 amino acids to about 65 amino acids, about 10 amino acids to about 60 amino acids, about 10 amino acids to about 55 amino acids, about 10 amino acids to about 50 amino acids, about 10 amino acids to about 45 amino acids, about 10 amino acids to about 40 amino acids, about 10 amino acids to about 35 amino acids, about 10 amino acids to about 30 amino acids, about 10 amino acids to about 25 amino acids, about 10 amino acids to about 20 amino acids, about 10 amino acids to about 15 amino acids, about 20 amino acids to about 100 amino acids, about 20 amino acid to about 95 amino acids, about 20 amino acids to about 90 amino acids, about 20 amino acids to about 85 amino acids, about 20 amino acids to about 80 amino acids, about 20 amino acids to about 75 amino acids, about 20 amino acids to about 70 amino acids, about 20 amino acids to about 65 amino acids, about 20 amino acids to about 60 amino acids, about 20 amino acids to about 55 amino acids, about 20 amino acids to about 50 amino acids, about 20 amino acids to about 45 amino acids, about 20 amino acids to about 40 amino acids, about 20 amino acids to about 35 amino acids, about 20 amino acids to about 30 amino acids, about 20 amino acids to about 25 amino acids, about 30 amino acids to about 100 amino acids, about 30 amino acid to about 95 amino acids, about 30 amino acids to about 90 amino acids, about 30 amino acids to about 85 amino acids, about 30 amino acids to about 80 amino acids, about 30 amino acids to about 75 amino acids, about 30 amino acids to about 70 amino acids, about 30 amino acids to about 65 amino acids, about 30 amino acids to about 60 amino acids, about 30 amino acids to about 55 amino acids, about 30 amino acids to about 50 amino acids, about 30 amino acids to about 45 amino acids, about 30 amino acids to about 40 amino acids, about 30 amino acids to about 35 amino acids, about 40 amino acids to about 100 amino acids, about 40 amino acid to about 95 amino acids, about 40 amino acids to about 90 amino acids, about 40 amino acids to about 85 amino acids, about 40 amino acids to about 80 amino acids, about 40 amino acids to about 75 amino acids, about 40 amino acids to about 70 amino acids, about 40 amino acids to about 65 amino acids, about 40 amino acids to about 60 amino acids, about 40 amino acids to about 55 amino acids, about 40 amino acids to about 50 amino acids, about 40 amino acids to about 45 amino acids, about 50 amino acids to about 100 amino acids, about 50 amino acid to about 95 amino acids, about 50 amino acids to about 90 amino acids, about 50 amino acids to about 85 amino acids, about 50 amino acids to about 80 amino acids, about 50 amino acids to about 75 amino acids, about 50 amino acids to about 70 amino acids, about 50 amino acids to about 65 amino acids, about 50 amino acids to about 60 amino acids, about 50 amino acids to about 55 amino acids, about 60 amino acids to about 100 amino acids, about 60 amino acid to about 95 amino acids, about 60 amino acids to about 90 amino acids, about 60 amino acids to about 85 amino acids, about 60 amino acids to about 80 amino acids, about 60 amino acids to about 75 amino acids, about 60 amino acids to about 70 amino acids, about 60 amino acids to about 65 amino acids, about 70 amino acids to about 100 amino acids, about 70 amino acid to about 95 amino acids, about 70 amino acids to about 90 amino acids, about 70 amino acids to about 85 amino acids, about 70 amino acids to about 80 amino acids, about 70 amino acids to about 75 amino acids, about 80 amino acids to about 100 amino acids, about 80 amino acid to about 95 amino acids, about 80 amino acids to about 90 amino acids, about 80 amino acids to about 85 amino acids, about 90 amino acids to about 100 amino acids, about 90 amino acids to about 95 amino acids, or about 95 amino acids to about 100 amino acids, removed from its N-terminus and/or 1 amino acid to 100 amino acids (or any of the subranges of this range described herein) removed from its C-terminus.

[0084] In some embodiments, an active target protein (e.g., a supporting cell target protein or a hair cell target protein) can, e.g., include the sequence of a wildtype, full-length target protein (e.g., a wildtype, full-length supporting cell target protein or a wildtype, full-length hair cell target protein) where 1 amino acid to 50 amino acids, 1 amino acid to 45 amino acids, 1 amino acid to 40 amino acids, 1 amino acid to 35 amino acids, 1 amino acid to 30 amino acids, 1 amino acid to 25 amino acids, 1 amino acid to 20 amino acids, 1 amino acid to 15 amino acids, 1 amino acid to 10 amino acids, 1 amino acid to 9 amino acids, 1 amino acid to 8 amino acids, 1 amino acid to 7 amino acids, 1 amino acid to 6 amino acids, 1 amino acid to 5 amino acids, 1 amino acid to 4 amino acids, 1 amino acid to 3 amino acids, about 2 amino acids to 50 amino acids, about 2 amino acids to 45 amino acids, about 2 amino acids to 40 amino acids, about 2 amino acids to 35 amino acids, about 2 amino acids to 30 amino acids, about 2 amino acids to 25 amino acids, about 2 amino acids to 20 amino acids, about 2 amino acids to 15 amino acids, about 2 amino acids to 10 amino acids, about 2 amino acids to 9 amino acids, about 2 amino acids to 8 amino acids, about 2 amino acids to 7 amino acids, about 2 amino acids to 6 amino acids, about 2 amino acids to 5 amino acids, about 2 amino acids to 4 amino acids, about 3 amino acids to 50 amino acids, about 3 amino acids to 45 amino acids, about 3 amino acids to 40 amino acids, about 3 amino acids to 35 amino acids, about 3 amino acids to 30 amino acids, about 3 amino acids to 25 amino acids, about 3 amino acids to 20 amino acids, about 3 amino acids to 15 amino acids, about 3 amino acids to 10 amino acids, about 3 amino acids to 9 amino acids, about 3 amino acids to 8 amino acids, about 3 amino acids to 7 amino acids, about 3 amino acids to 6 amino acids, about 3 amino acids to 5 amino acids, about 4 amino acids to 50 amino acids, about 4 amino acids to 45 amino acids, about 4 amino acids to 40 amino acids, about 4 amino acids to 35 amino acids, about 4 amino acids to 30 amino acids, about 4 amino acids to 25 amino acids, about 4 amino acids to 20 amino acids, about 4 amino acids to 15 amino acids, about 4 amino acids to 10 amino acids, about 4 amino acids to 9 amino acids, about 4 amino acids to 8 amino acids, about 4 amino acids to 7 amino acids, about 4 amino acids to 6 amino acids, about 5 amino acids to 50 amino acids, about 5 amino acids to 45 amino acids, about 5 amino acids to 40 amino acids, about 5 amino acids to 35 amino acids, about 5 amino acids to 30 amino acids, about 5 amino acids to 25 amino acids, about 5 amino acids to 20 amino acids, about 5 amino acids to 15 amino acids, about 5 amino acids to 10 amino acids, about 5 amino acids to 9 amino acids, about 5 amino acids to 8 amino acids, about 5 amino acids to 7 amino acids, about 6 amino acids to 50 amino acids, about 6 amino acids to 45 amino acids, about 6 amino acids to 40 amino acids, about 6 amino acids to 35 amino acids, about 6 amino acids to 30 amino acids, about 6 amino acids to 25 amino acids, about 6 amino acids to 20 amino acids, about 6 amino acids to 15 amino acids, about 6 amino acids to 10 amino acids, about 6 amino acids to 9 amino acids, about 6 amino acids to 8 amino acids, about 7 amino acids to 50 amino acids, about 7 amino acids to 45 amino acids, about 7 amino acids to 40 amino acids, about 7 amino acids to 35 amino acids, about 7 amino acids to 30 amino acids, about 7 amino acids to 25 amino acids, about 7 amino acids to 20 amino acids, about 7 amino acids to 15 amino acids, about 7 amino acids to 10 amino acids, about 7 amino acids to 9 amino acids, about 8 amino acids to 50 amino acids, about 8 amino acids to 45 amino acids, about 8 amino acids to 40 amino acids, about 8 amino acids to 35 amino acids, about 8 amino acids to 30 amino acids, about 8 amino acids to 25 amino acids, about 8 amino acids to 20 amino acids, about 8 amino acids to 15 amino acids, about 8 amino acids to 10 amino acids, about 10 amino acids to 50 amino acids, about 10 amino acids to 45 amino acids, about 10 amino acids to 40 amino acids, about 10 amino acids to 35 amino acids, about 10 amino acids to 30 amino acids, about 10 amino acids to 25 amino acids, about 10 amino acids to 20 amino acids, about 10 amino acids to 15 amino acids, about 15 amino acids to 50 amino acids, about 15 amino acids to 45 amino acids, about 15 amino acids to 40 amino acids, about 15 amino acids to 35 amino acids, about 15 amino acids to 30 amino acids, about 15 amino acids to 25 amino acids, about 15 amino acids to 20 amino acids, about 20 amino acids to 50 amino acids, about 20 amino acids to 45 amino acids, about 20 amino acids to 40 amino acids, about 20 amino acids to 35 amino acids, about 20 amino acids to 30 amino acids, about 20 amino acids to 25 amino acids, about 25 amino acids to 50 amino acids, about 25 amino acids to 45 amino acids, about 25 amino acids to 40 amino acids, about 25 amino acids to 35 amino acids, about 25 amino acids to 30 amino acids, about 30 amino acids to 50 amino acids, about 30 amino acids to 45 amino acids, about 30 amino acids to 40 amino acids, about 30 amino acids to 35 amino acids, about 35 amino acids to 50 amino acids, about 35 amino acids to 45 amino acids, about 35 amino acids to 40 amino acids, about 40 amino acids to 50 amino acids, about 40 amino acids to 45 amino acids, or about 45 amino acids to about 50 amino acids, are inserted. In some examples, the 1 amino acid to 50 amino acids (or any subrange thereof) can be inserted as a contiguous sequence into the sequence of a wildtype, full-length protein. In some examples, the 1 amino acid to 50 amino acids (or any subrange thereof) are not inserted as a contiguous sequence into the sequence of a wildtype, full-length protein. As can be appreciated in the art, the 1 amino acid to 50 amino acids can be inserted into a portion of the sequence of a wildtype, full-length protein that is not well-conserved between species.

[0085] Unless otherwise defined, all technical and scientific terms used herein have the same meaning as commonly understood by one of ordinary skill in the art to which this invention belongs. Methods and materials are described herein for use in the present invention; other suitable methods and materials known in the art can also be used. The materials, methods, and examples are illustrative only and not intended to be limiting. All publications, patent applications, patents, sequences, database entries, and other references mentioned herein are incorporated by reference in their entirety. In case of conflict, the present specification, including definitions, will control.

### BRIEF DESCRIPTION OF DRAWINGS

[0086] FIG. 1A is a representative image of Myo7a/Iba-1 immunofluorescent staining of cochlear tissue of a cynomolgus macaque (non-human primate) following administration of a single Anc80-GFP AAV vector directly into the inner ear through the round window.

[0087] FIG. 1B is a representative image of Anc80-GFP immunofluorescent staining of the same cochlear tissue of the cynomolgus macaque as in FIG. 1A.

[0088] FIG. 1C is a representative image of a merged immunofluorescent staining of Myo7a/Iba-1 and Anc80-GFP of the same cochlear tissue of the cynomolgus macaque as in FIG. 1A.

### DETAILED DESCRIPTION

[0089] Provided herein are compositions that include at least two different nucleic acid vectors, where: each of the at least two different adeno-associated virus (AAV) vectors includes a coding sequence that encodes a different portion of a supporting cell target protein, each of the encoded portions being at least 30 amino acid residues in length, where the amino acid sequence of each of the encoded portions may optionally partially overlap with the amino acid sequence of a different one of the encoded portions; no single vector of the at least two different vectors encodes the full-length supporting cell target protein; at least one of the coding sequences includes a nucleotide sequence spanning two neighboring exons of the supporting cell target genomic DNA, and lacks an intronic sequence between the two neighboring exons; and when introduced into a primate cell the at least two different vectors undergo concatamerization or homologous recombination with each other, thereby forming a recombined nucleic acid that encodes a full-length supporting cell target protein.

[0090] Provided herein are compositions including two different nucleic acid vectors, where: a first nucleic acid vector of the two different nucleic acid vectors includes a promoter, a first coding sequence that encodes an N-terminal portion of a supporting cell target protein positioned 3′ of the promoter, and a splicing donor signal sequence positioned at the 3′ end of the first coding sequence; and a second nucleic acid vector of the two different nucleic acid vectors includes a splicing acceptor signal sequence, a second coding sequence that encodes a C-terminal portion of a supporting cell target protein positioned at the 3′ end of the splicing acceptor signal sequence, and a polyadenylation sequence at the 3′ end of the second coding sequence; where each of the encoded portions is at least 30 amino acid residues in length, where the amino acid sequences of the encoded portions do not overlap, where no single vector of the two different vectors encodes the full-length supporting cell target protein, and, when the coding sequences are transcribed in a primate cell, to produce RNA transcripts, splicing occurs between the splicing donor signal sequence on one transcript and the splicing acceptor signal sequence on the other transcript, thereby forming a recombined RNA molecule that encodes a full-length supporting cell target protein.

[0091] Provided herein are compositions including: a first nucleic acid vector including a promoter, a first coding sequence that encodes an N-terminal portion of a supporting cell target protein positioned 3′ of the promoter, a splicing donor signal sequence positioned at the 3′ end of the first coding sequence, and a first detectable marker gene positioned 3′ of the splicing donor signal sequence; and a second nucleic acid vector, different from the first nucleic acid vector, including a second detectable marker gene, a splicing acceptor signal sequence positioned 3′ of the second detectable marker gene, a second coding sequence that encodes a C-terminal portion of a supporting cell target protein positioned at the 3′ end of the splicing acceptor signal sequence, and a polyadenylation sequence positioned at the 3′ end of the second coding sequence; where each of the encoded portions is at least 30 amino acid residues in length, where the respective amino acid sequences of the encoded portions do not overlap with each other, where no single vector of the two different vectors encodes the full-length supporting cell target protein, and, when the coding sequences are transcribed in a primate cell to produce RNA transcripts, splicing occurs between the splicing donor signal on one transcript and the splicing acceptor signal on the other transcript, thereby forming a recombined RNA molecule that encodes a full-length supporting cell target protein.

[0092] Provided herein are compositions including: a first nucleic acid vector including a promoter, a first coding sequence that encodes an N-terminal portion of a supporting cell target protein positioned 3′ to the promoter, a splicing donor signal sequence positioned at the 3′ end of the first coding sequence, and a F1 phage recombinogenic region positioned 3′ to the splicing donor signal sequence; and a second nucleic acid vector, different from the first nucleic acid vector, including a second F1 phage recombinogenic region, a splicing acceptor signal sequence positioned 3′ of the second F1 phage recombinogenic region, a second coding sequence that encodes a C-terminal portion of a supporting cell target protein positioned at the 3′ end of the splicing acceptor signal sequence, and a polyadenylation sequence positioned at the 3′ end of the second coding sequence; where each of the encoded portions is at least 30 amino acid residues in length, where the respective amino acid sequences of the encoded portions do not overlap with each other, where no single vector of the two different vectors encodes the full-length supporting cell target protein, and, when the coding sequences are transcribed in a primate cell to produce RNA transcripts, splicing occurs between the splicing donor signal one transcript and the splicing acceptor signal on the other transcript, thereby forming a recombined RNA molecule that encodes a full-length supporting cell target protein.

[0093] Provided herein are compositions including a single adeno-associated virus (AAV) vector, where the single AAV vector that includes a nucleic acid sequence that encodes a supporting cell target protein; and when introduced into a primate cell, a nucleic acid encoding a full-length supporting cell target protein is generated at the locus of the supporting cell target gene, and the primate expresses the supporting cell target protein.

[0094] Provided herein are compositions that include at least two different nucleic acid vectors, where: each of the at least two different adeno-associated virus (AAV) vectors includes a coding sequence that encodes a different portion of a hair cell target protein, each of the encoded portions being at least 30 amino acid residues in length, where the amino acid sequence of each of the encoded portions may optionally partially overlap with the amino acid sequence of a different one of the encoded portions; no single vector of the at least two different vectors encodes the full-length hair cell target protein; at least one of the coding sequences includes a nucleotide sequence spanning two neighboring exons of the hair cell target genomic DNA, and lacks an intronic sequence between the two neighboring exons; and when introduced into a primate cell the at least two different vectors undergo concatamerization or homologous recombination with each other, thereby forming a recombined nucleic acid that encodes a full-length hair cell target protein.

[0095] Provided herein are compositions including two different nucleic acid vectors, where: a first nucleic acid vector of the two different nucleic acid vectors includes a promoter, a first coding sequence that encodes an N-terminal portion of a hair cell target protein positioned 3′ of the promoter, and a splicing donor signal sequence positioned at the 3′ end of the first coding sequence; and a second nucleic acid vector of the two different nucleic acid vectors includes a splicing acceptor signal sequence, a second coding sequence that encodes a C-terminal portion of a hair cell target protein positioned at the 3′ end of the splicing acceptor signal sequence, and a polyadenylation sequence at the 3′ end of the second coding sequence; where each of the encoded portions is at least 30 amino acid residues in length, where the amino acid sequences of the encoded portions do not overlap, where no single vector of the two different vectors encodes the full-length hair cell target protein, and, when the coding sequences are transcribed in a primate cell, to produce RNA transcripts, splicing occurs between the splicing donor signal sequence on one transcript and the splicing acceptor signal sequence on the other transcript, thereby forming a recombined RNA molecule that encodes a full-length hair cell target protein.

[0096] Provided herein are compositions including: a first nucleic acid vector including a promoter, a first coding sequence that encodes an N-terminal portion of a hair cell target protein positioned 3′ of the promoter, a splicing donor signal sequence positioned at the 3′ end of the first coding sequence, and a first detectable marker gene positioned 3′ of the splicing donor signal sequence; and a second nucleic acid vector, different from the first nucleic acid vector, including a second detectable marker gene, a splicing acceptor signal sequence positioned 3′ of the second detectable marker gene, a second coding sequence that encodes a C-terminal portion of a hair cell target protein positioned at the 3′ end of the splicing acceptor signal sequence, and a polyadenylation sequence positioned at the 3′ end of the second coding sequence; where each of the encoded portions is at least 30 amino acid residues in length, where the respective amino acid sequences of the encoded portions do not overlap with each other, where no single vector of the two different vectors encodes the full-length hair cell target protein, and, when the coding sequences are transcribed in a primate cell to produce RNA transcripts, splicing occurs between the splicing donor signal on one transcript and the splicing acceptor signal on the other transcript, thereby forming a recombined RNA molecule that encodes a full-length hair cell target protein.

[0097] Provided herein are compositions including: a first nucleic acid vector including a promoter, a first coding sequence that encodes an N-terminal portion of a hair cell target protein positioned 3′ to the promoter, a splicing donor signal sequence positioned at the 3′ end of the first coding sequence, and a F1 phage recombinogenic region positioned 3′ to the splicing donor signal sequence; and a second nucleic acid vector, different from the first nucleic acid vector, including a second F1 phage recombinogenic region, a splicing acceptor signal sequence positioned 3′ of the second F1 phage recombinogenic region, a second coding sequence that encodes a C-terminal portion of a hair cell target protein positioned at the 3′ end of the splicing acceptor signal sequence, and a polyadenylation sequence positioned at the 3′ end of the second coding sequence; where each of the encoded portions is at least 30 amino acid residues in length, where the respective amino acid sequences of the encoded portions do not overlap with each other, where no single vector of the two different vectors encodes the full-length hair cell target protein, and, when the coding sequences are transcribed in a primate cell to produce RNA transcripts, splicing occurs between the splicing donor signal one transcript and the splicing acceptor signal on the other transcript, thereby forming a recombined RNA molecule that encodes a full-length hair cell target protein.

[0098] Also provided herein are compositions including a single adeno-associated virus (AAV) vector, where the single AAV vector that includes a nucleic acid sequence that encodes a hair cell target protein; and when introduced into a primate cell, a nucleic acid encoding a full-length hair cell target protein is generated at the locus of the hair cell target gene, and the primate expresses the hair cell target protein.

[0099] Also provided are kits that include any of the compositions described herein. Also provided herein are methods that include introducing into a cochlea of a mammal a therapeutically effective amount of any of the compositions described herein.

[0100] Also provided are methods of correcting a supporting cell target gene defect in a supporting cell of an inner ear in a primate that include: administering to the inner ear of the primate a therapeutically effective amount of any of the compositions described herein, where the administering repairs the supporting cell target gene defect in the supporting cell of the inner ear of the primate.

[0101] Also provided are methods of correcting a hair cell target gene defect in a hair cell of an inner ear in a primate that include: administering to the inner ear of the primate a therapeutically effective amount of any of the compositions described herein, where the administering repairs the hair cell target gene defect in the hair cell of the inner ear of the primate.

[0102] Also provided herein are methods of increasing the expression level of a supporting cell target protein in a supporting cell of an inner ear of a primate that include: administering to the inner ear of the primate a therapeutically effective amount of any of the compositions described herein, where the administering results in an increase in the expression level of the supporting cell target protein in the supporting cell of the inner ear of the primate.

[0103] Also provided herein are methods of increasing the expression level of a hair cell target protein in a hair cell of an inner ear of a primate that include: administering to the inner ear of the primate a therapeutically effective amount of any of the compositions described herein, where the administering results in an increase in the expression level of the hair cell target protein in the hair cell of the inner ear of the primate.

[0104] Also provided herein are methods of treating hearing loss, e.g., non-syndromic sensorineural hearing loss or syndromic sensorineural hearing loss, in a primate identified as having a defective supporting cell target gene that include: administering to the inner ear of the primate a therapeutically effective amount of any of the compositions described herein.

[0105] Also provided herein are methods of treating hearing loss, e.g., non-syndromic sensorineural hearing loss or syndromic sensorineural hearing loss, in a primate identified as having a defective hair cell target gene that include: administering to the inner ear of the primate a therapeutically effective amount of any of the compositions described herein.

[0106] Also provided herein are methods of restoring hearing in a primate identified or diagnosed as having hearing loss that include: administering to the inner ear of the primate a therapeutically effective amount of any of the compositions described herein.

[0107] Also provided herein are methods of restoring synapses and/or preserving spiral ganglion nerves in a primate identified or diagnosed as having an inner ear disorder that include: administering to the inner ear of the primate a therapeutically effective amount of any of the compositions described herein.

[0108] Also provided herein are methods that include administering to an inner ear of a primate a therapeutically effective amount of any of the compositions described herein.

[0109] Additional non-limiting aspects of the compositions, kits, and methods are described herein and can be used in any combination without limitation.

### Gap Junction Protein Beta 2 (GJB2)

[0110] The GJB2 gene encodes gap junction protein beta 2, a member of the gap junction protein family. Gap junction proteins are specialized proteins, also called connexins, involved in intracellular communication. Mutations in GJB2 have been associated with hearing loss and deafness (Amorini et al., Ann. Hum. Genet. 79(5):341-349, 2015; Qing et al., Genet. Test Mol. Biomarkers 19(1):52-58, 2015).

[0111] The human GJB2 gene is located on chromosome 13q12. It contains 2 exons encompassing ˜5 kilobases (kb) (NCBI Accession No. NG008358.1). The full-length wildtype GJB2 protein expressed from the human GJB2 gene is 226 amino acids in length.

[0112] Various mutations in the GJB2 gene have been associated with hearing loss (e.g., non-syndromic sensorineural hearing loss or syndromic sensorineural hearing loss). For example, the c.35delG allele was found on 65.5% of patients from Eastern Sicily (Amorini et al., Ann. Hum. Genet. 79(5):341-349, 2015).

[0113] Additional exemplary mutations in a GJB2 gene detected in subjects having non-syndromic sensorineural hearing loss or syndromic sensorineural hearing loss, and methods of sequencing a nucleic acid encoding GJB2 are described in, e.g., Snoeckx et al., Am. J. Hum. Genet 77: 945-957, 2005; Welch et al., Am. J. Med. Genet A 143: 1567-1573, 2007; and Zelante et al., Hum. Mol. Genet. 6:1605-1609, 1997. Methods of detecting mutations in a gene are well-known in the art. Non-limiting examples of such techniques include: real-time polymerase chain reaction (RT-PCR), PCR, sequencing, Southern blotting, and Northern blotting.

[0114] An exemplary human wildtype GJB2 protein is or includes the sequence of SEQ ID NO: 1. Non-limiting examples of nucleic acid encoding a wildtype GJB2 protein are or include SEQ ID NO: 2. As can be appreciated in the art, at least some or all of the codons in SEQ ID NO: 2 can be codon-optimized to allow for optimal expression in a non-human mammal.

[0115] In some embodiments of any of the compositions described herein, the GJB2 protein comprises a sequence that is at least 75% (e.g., at least 80%, at least 85%, at least 90%, at least 91%, at least 92%, at least 93%, at least 94%, at least 95%, at least 96%, at least 97%, at least 98%, at least 99%) identical to SEQ ID NO: 1.

Human Full-length Wildtype GJB2 Protein
(SEQ ID NO: 1)
MDWGTLQTILGGVNKHSTSIGKIWLTVLFIFRIMILVVAAKEVWGDEQAD
FVCNTLQPGCKNVCYDHYFPISHIRLWALQLIFVSTPALLVAMHVAYRRH
EKKRKFIKGEIKSEFKDIEEIKTQKVRIEGSLWWTYTSSIFFRVIFEAAF
MYVFYVMYDGFSMQRLVKCNAWPCPNTVDCFVSRPTEKTVFTVFMIAVSG
ICILLNVTELCYLLIRYCSGKSKKPV
Human Wildtype GJB2 cDNA
(SEQ ID NO: 2)
atggattggggcacgctgcagacgatcctggggggtgtgaacaaacactc
caccagcattggaaagatctggctcaccgtcctcttcatttttcgcatta
tgatcctcgttgtggctgcaaaggaggtgtggggagatgagcaggccgac
tttgtctgcaacaccctgcagccaggctgcaagaacgtgtgctacgatca
ctacttccccatctcccacatccggctatgggccctgcagctgatcttcg
tgtccacgccagcgctcctagtggccatgcacgtggcctaccggagacat
gagaagaagaggaagttcatcaagggggagataaagagtgaatttaagga
catcgaggagatcaaaacccagaaggtccgcatcgaaggctccctgtggt
ggacctacacaagcagcatcttcttccgggtcatcttcgaagccgccttc
atgtacgtcttctatgtcatgtacgacggcttctccatgcagcggctggt
gaagtgcaacgcctggccttgtcccaacactgtggactgctttgtgtccc
ggcccacggagaagactgtcttcacagtgttcatgattgcagtgtctgga
atttgcatcctgctgaatgtcactgaattgtgttatttgctaattagata
ttgttctgggaagtcaaaaaagccagtttaa

[0116] A non-limiting example of a human wildtype GJB2 genomic DNA sequence is SEQ ID NO: 3. The exons in SEQ ID NO: 3 are: nucleotide positions 1-156 (exon 1), and nucleotide positions 3336-5469 (exon 2). The intron is located between each of these exons in SEQ ID NO: 3, i.e., at nucleotide positions 157-3335 (intron 1).

| Human Wildtype GJB2 Gene Sequence (NCBI Reference Sequence: NG_008358.1) | |
|---|---|
| (SEQ ID NO: 3) | |
| 1 | ggggtgcggt taaaaggcgc cacggcggga gacaggtgtt gcggccccgc agcgcccgcg |
| 61 | cgctcctctc cccgactcgg agcccctcgg cggcgcccgg cccaggaccc gcctaggagc |
| 121 | gcaggagccc cagcgcagag accccaacgc cgagaccccc gccccggccc cgccgcgctt |
| 181 | cctcccgacg caggtgagcc cgccggcccc ggactgcccg gccaggaacc tggcgcgggg |
| 241 | agggaccgcg agacccagag cggttgcccg gccgcgtggg tctcggggaa ccggggggct |
| 301 | ggaccaacac acgtccttgg gccggggggc gggggccgcc ttctggagcg ggcgtttctg |
| 361 | cggccgagct ccggagctgg aatggggcgg ccggggaagt ggacgcgatg gcaccgcccg |
| 421 | gggtgcgagt ggggccgggc gcgcgcggga ggggaaaaag gcgcgggcga gccgccagcg |
| 481 | cgaggtttgt ggtgtcgccg atgtcccttc ggggtactct agcgcagccg cctggctact |
| 541 | tgacccactg ccaccaaacg ttttaaattc accgaaagct tagcttcgaa gcaaagctcc |
| 601 | gtttcgccgg tgaagcagga agccttcgct gcaggaactg acctttacct cttggagcgg |
| 661 | cttctgcaga aaaatccccg ggcagagatt tgggcggagt ttgcctagaa ctaacgcgga |
| 721 | gccagccgat cccggcctac cccggggcca agatttcagt ggcttccctt tttcctaaac |
| 781 | acttcacgag ggtctgtttc cgggctgtgc tccccgccta gaaggaaaat ttttaggacc |
| 841 | cttgttcgcg aagaggtggt gtgcggctga gacccgcgtc ctcaggacgg ttccatcagt |
| 901 | gcctcgatcc tgccccactg gaggaggaag gcagcccgaa cagcgctcac ctaactaaca |
| 961 | gctgctgaga gctgggttcc gtggccatgc acctgggact gccttgagaa gcgtggtacg |
| 1021 | gccgtgtccc catgtgacct tagagtccct ttcgaaactg ctgtgcacag tcggtcacaa |
| 1081 | tttcagacac tggtgagaag ggtggaggaa ccctctgggg acagccaggc aaggtcgacc |
| 1141 | acccatcacc taagggtgga gaaatttaag gggtgaagag tcccttttgc cttttctgga |
| 1201 | tcctggtgat tcacctagtg tcttccctaa ggaactgaac caactcctcc gctggcctct |
| 1261 | ggcagccctc caggcggtgc aggatggcgt gggcccggta ggaagctgca tgtaaccgcc |
| 1321 | cagggtcggg aggccaggag ggcagctcct cctctgactt gaatattgaa aacaacttcg |
| 1381 | tcctgcttct gagcccctct taacccatga ccccctagcc cattggggag taaatcttaa |
| 1441 | tttactcctc ttcctgaaaa aggatcttta aaacaggtag cttcaactca agctttataa |
| 1501 | aataacaata tagggtttct cggaactgta tttttctcag ctgatggtaa ctggacaggt |
| 1561 | ctgtagaagg gtgtatgacc tgggtttggc aggtggaaga gggcaaagga taaacccctc |
| 1621 | ctcctgcagc cccatattct tggccaggtg tattgttgta aaccaggaga gagtttactt |
| 1681 | cggggagtat cctgttttcc actcagtgag ggccaatgaa gaatgtctaa ttccataaga |
| 1741 | tgcttttgtt aaaatcggaa tgttgctgtc ctcggtggtt ctgctgttgg gacgggactg |
| 1801 | gcctgagctg tgggtgctgt agcaggacaa ccagctcacc taagggcctc ccagtctgga |
| 1861 | ttatcaatgg gtcagtgctg aacctgggct aaaatattgt tttttccaat gatgttgtct |
| 1921 | ttcccaagct cagtgaagct aaatgtttca caggcctatg tcaatctgat gtaactttcg |
| 1981 | tggccacctc tctcctgtta gcctctgacc aaggtggcac tggatggttt ctgcctgacc |
| 2041 | ttggtgcccc gtggcagcga ctgtgggtca tgaaagacat tcactacgag cctgcttctg |
| 2101 | gagtccatca gaaaacggga tgcaacttgc ctaaaatgag gagaggagga tgcttttaag |
| 2161 | aaaaagaaga aggaggattc actaccagct ctgaagggtg gaaaagagat gattcatccg |
| 2221 | gattgtggag agggtggaat cttgtttagg agagcgttgg ttgtggcagg cagggtgtaa |
| 2281 | ctatgaatca gtgaagacaa ttcacatcct gggatgaaaa gaaggccatg ggctcacagg |
| 2341 | agattatcca ctggcctctc cacatccgct tgcagtaagg agtgtgggac tctcccaagc |
| 2401 | ttcagcgctg aactgcaatg cagtgacgtc gcttagctgg gccagtaacc gagggagttg |
| 2461 | aattttctgt cattttaaaa taatgtgtct tttaagaaac actttgaaat taaaaccaca |
| 2521 | gcccacaatt ataatgcact gttgcagcac ttatcaaaac agatatgcta actgagccat |
| 2581 | cagtgccagc ctgacagtga ggccaccaag ccatccacaa agcctacacg aaagtctgtg |
| 2641 | ctcacagtgg cttttctcca tgaagagggc attcctaacc tcttcctttc acgtaggagg |
| 2701 | aagcaaggtc ctttgtaaaa ttttaactcg gggtgcctca aatgtaaact taaccactgg |
| 2761 | taacaacagt ttcactgcta catgccacgt ctgtgaaaat tcattcaaga cattaaggaa |
| 2821 | agtggctcag cagagagact agacatctta tcctcacggt tctcctgtac ttggcctctc |
| 2881 | agcctttgag caaggttggc ccaagctagt atcggcccca gtggtacagc caaaacttga |
| 2941 | gactgcaaat ggatgcagct gttgaacgct gagtaacttc tgcagagtca ggaagaccca |
| 3001 | aggaagctct gcagaggatg caggggtacg gtcagaaccc ctgagtgcct ttcagctaac |
| 3061 | gaggacttta tgacactccc cagcacagca aatttttatg atgtgtttaa agattgggtg |
| 3121 | aattactcag gtgaacaagc tactttttat cagagaacac ctaaaaacac gttcaagagg |
| 3181 | gtttgggaac tatacattta atcctatgac aaactaagtt ggttctgtct tcacctgttt |
| 3241 | tggtgaggtt gtgtaagagt tggtgtttgc tcaggaagag atttaagcat gcttgcttac |
| 3301 | ccagactcag agaagtctcc ctgttctgtc ctagctagtg attcctgtgt tgtgtgcatt |
| 3361 | cgtcttttcc agagcaaacc gcccagagta gaagatggat tggggcacgc tgcagacgat |
| 3421 | cctggggggt gtgaacaaac actccaccag cattggaaag atctggctca ccgtcctctt |
| 3481 | catttttcgc attatgatcc tcgttgtggc tgcaaaggag gtgtggggag atgagcaggc |
| 3541 | cgactttgtc tgcaacaccc tgcagccagg ctgcaagaac gtgtgctacg atcactactt |
| 3601 | ccccatctcc cacatccggc tatgggccct gcagctgatc ttcgtgtcca cgccagcgct |
| 3661 | cctagtggcc atgcacgtgg cctaccggag acatgagaag aagaggaagt tcatcaaggg |
| 3721 | ggagataaag agtgaattta aggacatcga ggagatcaaa acccagaagg tccgcatcga |
| 3781 | aggctccctg tggtggacct acacaagcag catcttcttc cgggtcatct tcgaagccgc |
| 3841 | cttcatgtac gtcttctatg tcatgtacga cggcttctcc atgcagcggc tggtgaagtg |
| 3901 | caacgcctgg ccttgtccca acactgtgga ctgctttgtg tcccggccca cggagaagac |
| 3961 | tgtcttcaca gtgttcatga ttgcagtgtc tggaatttgc atcctgctga atgtcactga |
| 4021 | attgtgttat ttgctaatta gatattgttc tgggaagtca aaaaagccag tttaacgcat |
| 4081 | tgcccagttg ttagattaag aaatagacag catgagaggg atgaggcaac ccgtgctcag |
| 4141 | ctgtcaaggc tcagtcgcta gcatttccca acacaaagat tctgacctta aatgcaacca |
| 4201 | tttgaaaccc ctgtaggcct caggtgaaac tccagatgcc acaatggagc tctgctcccc |
| 4261 | taaagcctca aaacaaaggc ctaattctat gcctgtctta attttctttc acttaagtta |
| 4321 | gttccactga gaccccaggc tgttaggggt tattggtgta aggtactttc atattttaaa |
| 4381 | cagaggatat cggcatttgt ttctttctct gaggacaaga gaaaaaagcc aggttccaca |
| 4441 | gaggacacag agaaggtttg ggtgtcctcc tggggttctt tttgccaact ttccccacgt |
| 4501 | taaaggtgaa cattggttct ttcatttgct ttggaagttt taatctctaa cagtggacaa |
| 4561 | agttaccagt gccttaaact ctgttacact ttttggaagt gaaaactttg tagtatgata |
| 4621 | ggttattttg atgtaaagat gttctggata ccattatatg ttccccctgt ttcagaggct |
| 4681 | cagattgtaa tatgtaaatg gtatgtcatt cgctactatg atttaatttg aaatatggtc |
| 4741 | ttttggttat gaatactttg cagcacagct gagaggctgt ctgttgtatt cattgtggtc |
| 4801 | atagcaccta acaacattgt agcctcaatc gagtgagaca gactagaagt tcctagtgat |
| 4861 | ggcttatgat agcaaatggc ctcatgtcaa atatttagat gtaattttgt gtaagaaata |
| 4921 | cagactggat gtaccaccaa ctactacctg taatgacagg cctgtccaac acatctccct |
| 4981 | tttccatgac tgtggtagcc agcatcggaa agaacgctga tttaaagagg tcgcttggga |
| 5041 | attttattga cacagtacca tttaatgggg aggacaaaat ggggcagggg agggagaagt |
| 5101 | ttctgtcgtt aaaaacagat ttggaaagac tggactctaa agtctgttga ttaaagatga |
| 5161 | gctttgtcta cttcaaaagt ttgtttgctt accccttcag cctccaattt tttaagtgaa |
| 5221 | aatatagcta ataacatgtg aaaagaatag aagctaaggt ttagataaat attgagcaga |
| 5281 | tctataggaa gattgaacct gaatattgcc attatgcttg acatggtttc caaaaaatgg |
| 5341 | tactccacat atttcagtga gggtaagtat tttcctgttg tcaagaatag cattgtaaaa |
| 5401 | gcattttgta ataataaaga atagctttaa tgatatgctt gtaactaaaa taattttgta |
| 5461 | atgtatcaaa tacatttaaa acattaaaat ataatctcta taataattta aaa |

### Solute Carrier Family 26 Member 4 (SLC26A4)

[0117] The SLC26A4 gene encodes the Pendred protein, and has homology to sulfate transporters. Mutations in SLC26A4 have been associated with hearing loss and deafness (Albert et al., Eur. J. Hum. Genet. 14:773-779, 2006; and Qing et al., Genet. Test Mol. Biomarkers 19(1):52-58, 2015).

[0118] The human SLC26A4 gene is located on chromosome 7q22. It contains 21 exons encompassing ˜57 kilobases (kb) (NCBI Accession No. NG_008489.1). The full-length wildtype SLC26A4 protein expressed from the human SLC26A4 gene is 780 amino acids in length.

[0119] Various mutations in the SLC26A4 gene have been associated with hearing loss. For example, point mutations V250A, D266N, E303Q, F345S, D697, K715N, and E737D have been reported in Chinese and U.S. patients with non-syndromic hearing loss (Dai et al., Physiol Genomics 38(3): 281-290, 2015).

[0120] Additional exemplary mutations in a SLC26A4 gene detected in subjects having non-syndromic sensorineural hearing loss or syndromic sensorineural hearing loss, and methods of sequencing a nucleic acid encoding SLC26A4 are described in, e.g., Albert et al., Eur. J. Hum. Genet. 14: 773-779, 2006; and Qing et al., Genet. Test Mol. Biomarkers 19(1):52-58, 2015. Methods of detecting mutations in a gene are well-known in the art. Non-limiting examples of such techniques include: real-time polymerase chain reaction (RT-PCR), PCR, sequencing, Southern blotting, and Northern blotting.

[0121] An exemplary human wildtype SLC26A4 protein is or includes the sequence of SEQ ID NO: 4. Non-limiting examples of nucleic acid encoding a wildtype SLC26A4 protein are or include SEQ ID NO: 5 or 6. As can be appreciated in the art, at least some or all of the codons in SEQ ID NO: 5 or 6 can be codon-optimized to allow for optimal expression in a non-human mammal.

[0122] In some embodiments of any of the compositions described herein, the SLC26A4 protein comprises a sequence that is at least 75% (e.g., at least 80%, at least 85%, at least 90%, at least 91%, at least 92%, at least 93%, at least 94%, at least 95%, at least 96%, at least 97%, at least 98%, at least 99%) identical to SEQ ID NO: 4.

Human Full-length Wildtype SLC26A4 Protein
(SEQ ID NO: 4)
MAAPGGRSEPPQLPEYSCSYMVSRPVYSELAFQQQHERRLQERKTLRESLAKCCSCSRKRAFGVLKTLVPI
LEWLPKYRVKEWLLSDVISGVSTGLVATLQGMAYALLAAVPVGYGLYSAFFPILTYFIFGTSRHISVGPFP
VVSLMVGSVVLSMAPDEHFLVSSSNGTVLNTTMIDTAARDTARVLIASALTLLVGIIQLIFGGLQIGFIVR
YLADPLVGGFTTAAAFQVLVSQLKIVLNVSTKNYNGVLSIIYTLVEIFQNIGDTNLADFTAGLLTIVVCMA
VKELNDRFRHKIPVPIPIEVIVTIIATAISYGANLEKNYNAGIVKSIPRGFLPPELPPVSLFSEMLAASFS
IAVVAYAIAVSVGKVYATKYDYTIDGNQEFIAFGISNIFSGFFSCFVATTALSRTAVQESTGGKTQVAGII
SAAIVMIAILALGKLLEPLQKSVLAAVVIANLKGMFMQLCDIPRLWRQNKIDAVIWVFTCIVSIILGLDLG
LLAGLIFGLLTVVLRVQFPSWNGLGSIPSTDIYKSTKNYKNIEEPQGVKILRFSSPIFYGNVDGFKKCIKS
TVGFDAIRVYNKRLKALRKIQKLIKSGQLRATKNGIISDAVSTNNAFEPDEDIEDLEELDIPTKEIEIQVD
WNSELPVKVNVPKVPIHSLVLDCGAISFLDVVGVRSLRVIVKEFQRIDVNVYFASLQDYVIEKLEQCGFFD
DNIRKDTFFLTVHDAILYLQNQVKSQEGQGSILETITLIQDCKDTLELIETELTEEELDVQDEAMRTLAS
Exemplary Human Wildtype SLC26A4 cDNA
(SEQ ID NO: 5)
atggcagcgccaggcggcaggtcggagccgccgcagctccccgagtacagctgcagctacatggtgtcgcg
gccggtctacagcgagctcgctttccagcaacagcacgagcggcgcctgcaggagcgcaagacgctgcggg
agagcctggccaagtgctgcagttgttcaagaaagagagcctttggtgtgctaaagactcttgtgcccatc
ttggagtggctccccaaataccgagtcaaggaatggctgcttagtgacgtcatttcgggagttagtactgg
gctagtggccacgctgcaagggatggcatatgccctactagctgcagttcctgtcggatatggtctctact
ctgcttttttccctatcctgacatactttatctttggaacatcaagacatatctcagttggaccttttcca
gtggtgagtttaatggtgggatctgttgttctgagcatggcccccgacgaacactttctcgtatccagcag
caatggaactgtattaaatactactatgatagacactgcagctagagatacagctagagtcctgattgcca
gtgccctgactctgctggttggaattatacagttgatatttggtggcttgcagattggattcatagtgagg
tacttggcagatcctttggttggtggcttcacaacagctgctgccttccaagtgctggtctcacagctaaa
gattgtcctcaatgtttcaaccaaaaactacaatggagttctctctattatctatacgctggttgagattt
ttcaaaatattggtgataccaatcttgctgatttcactgctggattgctcaccattgtcgtctgtatggca
gttaaggaattaaatgatcggtttagacacaaaatcccagtccctattcctatagaagtaattgtgacgat
aattgctactgccatttcatatggagccaacctggaaaaaaattacaatgctggcattgttaaatccatcc
caagggggtttttgcctcctgaacttccacctgtgagcttgttctcggagatgctggctgcatcattttcc
atcgctgtggtggcttatgctattgcagtgtcagtaggaaaagtatatgccaccaagtatgattacaccat
cgatgggaaccaggaattcattgcctttgggatcagcaacatcttctcaggattcttctcttgttttgtg
gccaccactgctctttcccgcacggccgtccaggagagcactggaggaaagacacaggttgctggcatcat
ctctgctgcgattgtgatgatcgccattcttgccctggggaagcttctggaacccttgcagaagtcggtct
tggcagctgttgtaattgccaacctgaaagggatgtttatgcagctgtgtgacattcctcgtctgtggaga
cagaataagattgatgctgttatctgggtgtttacgtgtatagtgtccatcattctggggctggatctcgg
tttactagctggccttatatttggactgttgactgtggtcctgagagttcagtttccttcttggaatggcc
ttggaagcatccctagcacagatatctacaaaagtaccaagaattacaaaaacattgaagaacctcaagga
gtgaagattcttagattttccagtcctattttctatggcaatgtcgatggttttaaaaaatgtatcaagtc
cacagttggatttgatgccattagagtatataataagaggctgaaagcgctgaggaaaatacagaaactaa
taaaaagtggacaattaagagcaacaaagaatggcatcataagtgatgctgtttcaacaaataatgctttt
gagcctgatgaggatattgaagatctggaggaacttgatatcccaaccaaggaaatagagattcaagtgga
ttggaactctgagcttccagtcaaagtgaacgttcccaaagtgccaatccatagccttgtgcttgactgt
ggagctatatctttcctggacgttgttggagtgagatcactgcgggtgattgtcaaagaattccaaagaat
tgatgtgaatgtgtattttgcatcacttcaagattatgtgatagaaaagctggagcaatgcgggttctttg
acgacaacattagaaaggacacattctttttgacggtccatgatgctatactctatctacagaaccaagtg
aaatctcaagagggtcaaggttccattttagaaacgatcactctcattcaggattgtaaagatacccttga
attaatagaaacagagctgacggaagaagaacttgatgtccaggatgaggctatgcgtacacttgcatcct
ga
Exemplary Human Wildtype SLC26A4 cDNA
(SEQ ID NO: 6)
ctcagccttcccggttcgggaaaggggaagaatgcaggaggggtaggatttctttcctgataggatcggtt
gggaaagaccgcagcctgtgtgtgtctttcccttcgaccaaggtgtctgttgctccgtaaataaaacgtcc
cactgccttctgagagcgctataaaggcagcggaagggtagtccgcggggcattccgggcggggcgcgagc
agagacaggtcatggcagcgccaggcggcaggtcggagccgccgcagctccccgagtacagctgcagctac
atggtgtcgcggccggtctacagcgagctcgctttccagcaacagcacgagcggcgcctgcaggagcgcaa
gacgctgcgggagagcctggccaagtgctgcagttgttcaagaaagagagcctttggtgtgctaaagactc
ttgtgcccatcttggagtggctccccaaataccgagtcaaggaatggctgcttagtgacgtcatttcggga
gttagtactgggctagtggccacgctgcaagggatggcatatgccctactagctgcagttcctgtcggata
tggtctctactctgcttttttccctatcctgacatactttatctttggaacatcaagacatatctcagttg
gaccttttccagtggtgagtttaatggtgggatctgttgttctgagcatggcccccgacgaacactttctc
gtatccagcagcaatggaactgtattaaatactactatgatagacactgcagctagagatacagctagagt
cctgattgccagtgccctgactctgctggttggaattatacagttgatatttggtggcttgcagattggat
tcatagtgaggtacttggcagatcctttggttggtggcttcacaacagctgctgccttccaagtgctggtc
tcacagctaaagattgtcctcaatgtttcaaccaaaaactacaatggagttctctctattatctatacgct
ggttgagatttttcaaaatattggtgataccaatcttgctgatttcactgctggattgctcaccattgtcg
tctgtatggcagttaaggaattaaatgatcggtttagacacaaaatcccagtccctattcctatagaagta
attgtgacgataattgctactgccatttcatatggagccaacctggaaaaaaattacaatgctggcattgt
taaatccatcccaagggggtttttgcctcctgaacttccacctgtgagcttgttctcggagatgctggctg
catcattttccatcgctgtggtggcttatgctattgcagtgtcagtaggaaaagtatatgccaccaagtat
gattacaccatcgatgggaaccaggaattcattgcctttgggatcagcaacatcttctcaggattcttctc
ttgttttgtggccaccactgctctttcccgcacggccgtccaggagagcactggaggaaagacacaggttg
ctggcatcatctctgctgcgattgtgatgatcgccattcttgccctggggaagcttctggaacccttgcag
aagtcggtcttggcagctgttgtaattgccaacctgaaagggatgtttatgcagctgtgtgacattcctcg
tctgtggagacagaataagattgatgctgttatctgggtgtttacgtgtatagtgtccatcattctggggc
tggatctcggtttactagctggccttatatttggactgttgactgtggtcctgagagttcagtttccttct
tggaatggccttggaagcatccctagcacagatatctacaaaagtaccaagaattacaaaaacattgaaga
acctcaaggagtgaagattcttagattttccagtcctattttctatggcaatgtcgatggttttaaaaaat
gtatcaagtccacagttggatttgatgccattagagtatataataagaggctgaaagcgctgaggaaaata
cagaaactaataaaaagtggacaattaagagcaacaaagaatggcatcataagtgatgctgtttcaacaaa
taatgcttttgagcctgatgaggatattgaagatctggaggaacttgatatcccaaccaaggaaatagaga
ttcaagtggattggaactctgagcttccagtcaaagtgaacgttcccaaagtgccaatccatagccttgtg
cttgactgtggagctatatctttcctggacgttgttggagtgagatcactgcgggtgattgtcaaagaatt
ccaaagaattgatgtgaatgtgtattttgcatcacttcaagattatgtgatagaaaagctggagcaatgcg
ggttctttgacgacaacattagaaaggacacattctttttgacggtccatgatgctatactctatctacag
aaccaagtgaaatctcaagagggtcaaggttccattttagaaacgatcactctcattcaggattgtaaaga
tacccttgaattaatagaaacagagctgacggaagaagaacttgatgtccaggatgaggctatgcgtacac
ttgcatcctgaaagtgggttcgggaggtctctatgagcaaggaatacaagacaaaacttcctcaatgcatt
gactatttcttcagactcaaaacactcattcttttttctattaagccattgaaagagaagcactaagactg
cttctaggctttatttataaaataaacaccttatccctaacatgggcaaaatggctagaattattcagacg
atttggcagcgtccagggtaagctggtgttataatacgctgctgatctacatcacagatttgctaataatg
ttcacgtgggccctggcatatctctgttcagttagagtgagtgctgacccaacagcctctgtggtcaagcg
agtcacgaatgattaatcataaagaaaaatcagtttttgactgacctggatatccatgagctgcactgatc
accatgtaaggtcacatttagtaaatgctgaaataaaatgattaatgcatttatcaataaaagcctttgaa
aatactttggataataaattggagttttaaaaatgcaaatttgcttagtatctaataatgaagtgttatta
catatagccggaattgaggatctctttgatcctggaaatggtttacctaaaagctacagaaccaggccaat
atattttgaaatattgatgcagacaaatgaaataataaagagattttcatggtttataaaaatcttttttg
atatgataataatcatgatcacaactgagatcaaaaaaatatatgacagattattttgtttaaaaatgcag
ttttaattatcttagtctatagaaatgatcattgcatggaggcatgtataggtatgatctgtgtaaaatct
gacataaaaacagtgctattctgagtgaaaatttttttgatgtgcttacataaccatggtgattaaaatga
gtttatattttttctcaaaaattttagcagtgtgtaaagtaagtaatctttaactgaactctgaccactta
aaaaaaaatctaaaaattgaactacctatagtagtctgtgtttaaagtgaatttttaaagacaaagcattc
taaatgaactcaatataaaaacattcatttggaatgtacatactgaaaaatacaggtttttttgaccaaaa
gtttttatatcttttctttttatttatttttttcctaagtgccaacaattttctagatattatatacaaca
caggctttgatcttggggacttttcccatatatttcacactggagtgaatgaagttgtacttcatttctag
agaaaagttatacccaggtccccaattgagaatgtcttgcttgattgaaaacgacatcatcccttggtata
ctccagggattggtttcaggacccctgcatttaccaaaatttgtgcacactcaagtcctgcagtcacccct
gcctaaagatagaatggcttctctgtttttcttctgaaatacaaccagaaacaatgtgtctatttctgaaa
gaataggattaatgatcatacaaatgggttaatcctgaattctggttgtaaatctggttacagcataacta
ggattataatgctgcctcattttcacagcactacttgcttatattgacaacaaatcatctcgctaaagagt
gaatgtaggccaggcgcggtggctcatgcctgtaatcccagcactttgggaggccgaggcgggtggatcac
gaggtcaggagatcgagaccatcctggctaacatggtaaaaccccgtctctactaaaaatagaaaaaaaga
aattagcctagcgtggtggctggcgggcgcctgtagtcccagctatttgggaggctaaggcaggagaatgg
cgtgaacccgggaggcggagcttgcagtgagccgaggtcgtgccactgcactccagcctgggcgacagagc
aagactccgtctcaaaaaaaaaaaaaaaaaaaaaaaaagagtgaatgtaatagtcttgcagaaaatgaatg
aatacctttgttcaataaaggaaatatgcactgctcacttttttgaaggaaatgccaaagttacgttttac
aacaaggctagagtttgtaaattctgggttcatttgtgatgacataagtcagcaaactgcgggaatactgt
ctcttctatgtattttgtgaatagtaagcataattttagttttgtattatcaatgaaaatttcacttgaaa
ttaaagctgccttttgttatatttttaacctataggataagattccagtattgtatatgagttttaacaaa
ttaaaaaatcaaatcatgtacatttgaaaatatttgcacacatttaaaaataaatgtaaagttgtctttta
aactactcggatgtgtcctttctgaacaa

[0123] A non-limiting example of a human wildtype SLC26A4 genomic is SEQ ID NO: 7. The exons in SEQ ID NO: 7 are: nucleotide positions 1-221 (exon 1), nucleotide positions 1005-1171 (exon 2), nucleotide positions 2262-2801 (exon 3), nucleotide positions 11504-11614 (exon 4), nucleotide positions 13530-13714 (exon 5), nucleotide positions 14311-14475 (exon 6), nucleotide positions 22568-22720 (exon 7), nucleotide positions 22821-22903 (exon 8), nucleotide positions 28419-28566 (exon 9), nucleotide positions 29490-29603 (exon 10), nucleotide positions 33769-33846 (exon 11), nucleotide positions 33987-34082 (exon 12), nucleotide positions 35299-35405 (exon 13), nucleotide positions 37408-37477 (exon 14), nucleotide positions 39449-39541 (exon 15), nucleotide positions 40467-40562 (exon 16), nucleotide positions 41193-41423 (exon 17), nucleotide positions 43697-43751 (exon 18), nucleotide positions 49420-49565 (exon 19), nucleotide positions 51905-51988 (exon 20) and nucleotide positions 56348-57175 (exon 21). The introns are located between each of these exons in SEQ ID NO: 7, i.e., at nucleotide positions 222-1004 (intron 1), nucleotide positions 1172-2261 (intron 2), nucleotide positions 2802-11503 (intron 3), nucleotide positions 11615-13529 (intron 4), nucleotide positions 13715-14310 (intron 5), nucleotide positions 14476-22567 (intron 6), nucleotide positions 22721-22820 (intron 7), nucleotide positions 22904-28418 (intron 8), nucleotide positions 28567-29489 (intron 9), nucleotide positions 29604-33768 (intron 10), nucleotide positions 33847-33986 (intron 11), nucleotide positions 34083-35298 (intron 12), nucleotide positions 35406-37407 (intron 13), nucleotide positions 37478-39448 (intron 14), nucleotide positions 39542-40466 (intron 15), nucleotide positions 40563-41192 (intron 16), nucleotide positions 41424-43696 (intron 17), nucleotide positions 43752-49419 (intron 18), nucleotide positions 49566-51904 (intron 19), and nucleotide positions 51989-56347 (intron 20).

| Human Wildtype SLC26A4 Gene Sequence (NCBI Reference Sequence: NG_008489.1) | |
|---|---|
| (SEQ ID NO: 7) | |
| 1 | ctcagccttc ccggttcggg aaaggggaag aatgcaggag gggtaggatt tctttcctga |
| 61 | taggatcggt tgggaaagac cgcagcctgt gtgtgtcttt cccttcgacc aaggtgtctg |
| 121 | ttgctccgta aataaaacgt cccactgcct tctgagagcg ctataaaggc agcggaaggg |
| 181 | tagtccgcgg ggcattccgg gcggggcgcg agcagagaca ggtgagttcg ccctgaagat |
| 241 | gcccacaccg cccggcccgg gctccactcc cggggaggcc tcgagggttg cggatgggac |
| 301 | tcttaagtgg tcacggatca ggtgggcagg gggcagtaca gctttctttc tgagacgccg |
| 361 | agagcgaaca ggctgctcgg aaaacaggac gaggggagag acttgctcaa taagctgaaa |
| 421 | gttctgcccc cgagagggct gcgacagctg ctggaatgtg cctgcagcgt ccgcctcttg |
| 481 | gggacccgcg gagcgcgccc tgacggttcc acgcctggcc cgggggtctg cacctctcct |
| 541 | ccagtgcgca cctggagctg cgtcccgggt caggtgcggg gagggaggga atctcagtgt |
| 601 | ccccttccag ccttgcaagc gcctttggcc cctgccccag cccctcggtt tgggggagat |
| 661 | ttcagaacgc ggacagcgcc ctggctgcgg gccatagggg actgggtgga actcgggaag |
| 721 | cccccagagc aggggcttac tcgcttcaag tttggggaac cccgggcagc gggtgcaggc |
| 781 | cacgagaccc gaaggttctc aggtgccccc ctgcaggctg gccgtgcgcg ccgtggggcg |
| 841 | cttgtcgcga gcgccgaggg ctgcaggacg cggaccagac tcgcggtgca ggggggcctg |
| 901 | gctgcagcta acaggtgatc ccgttctttc tgttcctcgc tcttcccctc cgatcgtcct |
| 961 | cgcttaccgc gtgtcctccc tcctcgctgt cctctggctc gcaggtcatg gcagcgccag |
| 1021 | gcggcaggtc ggagccgccg cagctccccg agtacagctg cagctacatg gtgtcgcggc |
| 1081 | cggtctacag cgagctcgct ttccagcaac agcacgagcg gcgcctgcag gagcgcaaga |
| 1141 | cgctgcggga gagcctggcc aagtgctgca ggtagcggcc gcgcgggcct gcgtagagag |
| 1201 | aagcggagcg gggcgtccac gccttgggga gggaagggcg tccccagcgg gcgagagtgg |
| 1261 | ggtgcgggcg gcggagcccc tgggcgccag ctgcttctcc cagaggcccg actttcggtc |
| 1321 | tccggtcctc cacgccgccc ttctggtggg agggtggctc catcagtctc gggcccgaaa |
| 1381 | tgaacttacc tgggaaactc gcctttgggg agagtgggtt ctaggagccc cgtctctctt |
| 1441 | tttcctctct gaaggaaact tggagtgcct cttggggtac agtgggtccc tgttgccttc |
| 1501 | ttgggagctt gtttaaatga aatgaatagg gaaacccagc tcttgaccag gaggagtcct |
| 1561 | tgaaacactc aagctaagta ggcgggctac cattcagtta gagaccagga tgcaagctag |
| 1621 | aacccagggg agcgcggggt gtgccaagta cttcatcagc aggctgtggg acccctgggg |
| 1681 | aaagccaccc tcagtctcta aacccaaaca tgccgtaact agatgtcaca aacataaaga |
| 1741 | aattagagtt tctaaaacct ttcattatag aacatttcaa atatatgcat aagtagacgt |
| 1801 | agtagtataa tgaactcccc acccccaccg tttttaaccc atcactcggc ctcaactgtg |
| 1861 | atcaaatcca agttactctt gtttcttgta tctacaccta cttgctccct ccagtattat |
| 1921 | ttttaagcaa atctcatata gcatactgtc tttatgtatt ttactgcata tctttaaaga |
| 1981 | ctcttaaaaa atataaccac atttcatgat cacaccttaa tatctaaaaa taacctccta |
| 2041 | atatcaaaaa ttgagtcatt attaaaatgt ccaatcgtcc cataaatgcc ttaattaaaa |
| 2101 | aacaatttat tcaaatcagg agttatacca cctacttttg atatttttct ttcatctgta |
| 2161 | ggtcactgaa tttaaaaact accaagtagc aaggtataag gtatacattc ctcatgctaa |
| 2221 | gatttttgta aaaactagct ccaggcttgt attgccaaaa tatactcagt gtgtttatct |
| 2281 | tctttaaaga aaataataat aataaggcgc ctggattagg agtctgaaaa gtaatctcca |
| 2341 | tttagagact ccacatccat cagtctctgg ctggaccaga aaataggttt ttgtgtagga |
| 2401 | atattttttc agaggattaa aaatgtgagc gaggggtggg acacttaatc ctgtgttctc |
| 2461 | tagaagagtg catttaaaag gatagataca gttcttggca aaagcatggt aagcacttca |
| 2521 | gggttattat tttccaggaa atacttatcc tttttccaaa tagttataaa catcagcaga |
| 2581 | atccagttca taactttgtg atttgcaaat tggttgtgac tgagattgga ttgaaaaccc |
| 2641 | agttttcttg ctttttgaca gttgttcaag aaagagagcc tttggtgtgc taaagactct |
| 2701 | tgtgcccatc ttggagtggc tccccaaata ccgagtcaag gaatggctgc ttagtgacgt |
| 2761 | catttcggga gttagtactg ggctagtggc cacgctgcaa ggtaagatgt tggcagattg |
| 2821 | agagttctgg tctccagcag gagtttaaca cttctcccca gctaccatag gtctgtgaca |
| 2881 | gatggttgct tacccttcaa ggcctgtatc tttcctgtag agccccttag tggagagagt |
| 2941 | cacctctctt ctccccttcc ttagagttct cttcctggga aactgctgcc ccactaggtg |
| 3001 | cagaggtcca atttagaggc atatactagg cagtggcttc tcaatttttt taaattttat |
| 3061 | tttatttgag acgggggctc gctctgtcac ctaggctgga gtgcagtggc gcaatcctgg |
| 3121 | ctcactgcaa gctccgtctc ccgggttcac gccattctcc cgcctcagcc tccccagtag |
| 3181 | ctgggactac aggcgcccgc cactacgccc ggctaatttt ttgtattttt agtagagacg |
| 3241 | gggtttcacc gggttagcca ggatggtatc gacctcctga cctcgtgatc cgcctgcctt |
| 3301 | ggcctcccaa aatgctggga ttacaggcgt gagccactgc acccagccag cttctctatt |
| 3361 | ttcattgacc acaattcaat aagaaatgtg taaagagttt caagtcaaga tttaaaaaaa |
| 3421 | aaaaagaaat gtgttacatc ctgatatata catatatatc taaagttcct gtgaaatatt |
| 3481 | tattataaca atgtgctaat ctttcacttt gttctattat gcttaggttt tttaaatgat |
| 3541 | gattgcagca cattaaatta ttttatatcc acacgtggat cttttttgtt ggtttgtttt |
| 3601 | gctttgcttt ttagagatac agtcttgctc tgtcacccag gctggtgtgc agtggcacga |
| 3661 | tcttggctca atgcaacctc tctgcctctc gggttcaagt gattcttgtg cctcagcctt |
| 3721 | ctgagtagct ggggctacag gcatgtgcca ccatgtccag ctaattactg tatttttagt |
| 3781 | agagatgggg tttcgccatg ttggccaggg tggtctggaa ctcctaacct caagtgatcc |
| 3841 | gccctccttg gtatcccaaa gtactgtgat tacaggcatg agccaccatg cccagcctcc |
| 3901 | cacacgtgga tcttgaggtg tagtttgaaa ctggcttaag gaaaagtgaa gggagcttcc |
| 3961 | tagcctggac tccacatgaa tgttttgcct gcccctcatc cctttttaaa aaaattcatc |
| 4021 | ctcttatttt aatgtgtggg aaaatgtgcc aacataggtg gttatttgtt cttttataaa |
| 4081 | ctgagttcat accataatat tcccataagc atcttagaaa tctgttgtat agttggtgcc |
| 4141 | tagcagcatg gcattctcct ctgtccccta tccccaccat ctcgtttctg ccccaccccc |
| 4201 | aacaccctga ccaatttccc aaagaccctg aatcatgaaa acagaaatat cgttatttat |
| 4261 | tataatttgt gaaacaccta atatgttcca ggcactaggt atgctgacac gaataagatg |
| 4321 | catcctctgc ttccaaggaa ctcatagtcc aatggagaaa gagaaaacaa ttcaatgtga |
| 4381 | taagggctgt ggcaggggag tgcaaattac ttgctaaggg agtgcaaatg aggttcactc |
| 4441 | aaagcggtct taggggatct tgaatagctt cctggaagtt gaatgtcaaa gctgagtttc |
| 4501 | cctgatggct aagtctgagt ttgccaagtg atgggaagta gggtggggtg gggatggctt |
| 4561 | gaaaatagac tatttcagaa gctagtaatg aatgttgagc aatattgtga gctaaaattt |
| 4621 | ggctatggag ctttcaagat tgctcagatc aggccaggta gatgcccgaa gagaaggagg |
| 4681 | atggcctatg aacccagggt ggagcctcag cctgatcaag catgttctta atcacaaagg |
| 4741 | tggacgggag agagactagg atgggcbgtg tggttcctaa gttaaacaat gccaagtatt |
| 4801 | ctacactgtg ctctaagggc tgtgacatgg tgacaccctg tgactcctgg gggacaggaa |
| 4861 | ccatgcctca ttcatgtttg ttcagcaggt gcctagcaca gagacaggca cataatagat |
| 4921 | ggtatattta gtgaaaaaga ttgaattgca ttcctgataa tgaatcttct ttatatataa |
| 4981 | aaaatggtgg ttcatgctcc atgtctcccc agttttcata gacaagtatc ttataagaat |
| 5041 | tcattttgtt tataagcatg agacactatg ctaagtaaga atgttgccag ctatctcatt |
| 5101 | taatcctcat aacaatcctg ctaggtaggt ctattattat ttcattttca gtaggtgaaa |
| 5161 | aaatctatta aatcttgccc agggtcacgt ggctggtaag tggtacagct gggattttaa |
| 5221 | tccggtgtct attgtgtagt tccttacttt atgggtaaga tgcttttcta gaaacattat |
| 5281 | ctctataaag ttttctgtgt aaggtgaatt tctgggaggt taatctggct cagttacaca |
| 5341 | tccatttatc attcattcac ttaataaata tttataaact aattctgtag accaggtatc |
| 5401 | cagccatgtg cactcagtgg ttcattaaca ggcacaggtg ctgacttcat ggagctttgt |
| 5461 | aaaattattt tgaggggtag ggatgggaat taaataagta gataaataga aaaataatta |
| 5521 | tagattgcaa tatctattgt ggtggattaa atatactgca atagggatta atttgaaagg |
| 5581 | tggatcttta tttttatatt tttttgagac agggtcttgc tctgttgcgc aggctggagt |
| 5641 | gcagtggtga gatcacagct caccacagcc ttggcctcct gggcccaggt gatcctccca |
| 5701 | tctcagcctc gccagtagct ggaactacag gcatgtgcca ccatgcttgg ctaatttttg |
| 5761 | tattttttgt agagacaagg tttcaccatg ttgcccaggc tggtctggaa ctcctaggct |
| 5821 | caagttatct gcctgcctcg gcctcccaaa gtgctgggat tagaggtgtg agccattgtg |
| 5881 | cccagccagg aagggaggtc tattttagat ataatggtca aggaagaact tactgagaag |
| 5941 | gtgaaattta gtaaaagaca agagaatgag aaggagacag ccatgtgata agcagaaaaa |
| 6001 | aagagtgtac caggtaaagg tgcaaaggcc ctgaggccag aaaacttagc attttccagg |
| 6061 | gaggaagagg aagaattgta gtgtggatga gtgcagtggg ggagggtgag taaaccatga |
| 6121 | aataaactga ggcaggactg ggattaggat gaggtaaggg aggcactcac tctcaggatg |
| 6181 | cctctttaaa tattgtaccc taggaaactc atttgcctca ccctattcct ggccctgtgg |
| 6241 | ggatattgct gtgaattaaa gggagaatgg gtgtgtcagc ttgaaccaga tgatgcaggc |
| 6301 | tatgaagaga gctgcaagat aggaatatat tgtgcagcaa gaatcactga cacataatga |
| 6361 | tgagtgtgga tgaaaatcac tgatgcctcc aaggttgttg gcttgagcaa ccggatagat |
| 6421 | cattacatca tttatctaaa tggcaaagac aggctgagga gcaggtttgg gataggaaat |
| 6481 | caagtttcct tttggatatg ctaagtttga gacacagggt gagacatcta agtggagatg |
| 6541 | ccacctagag aagtgggagc tactgcaagt gtgaaggtta gaggagaggt ctaggctaga |
| 6601 | cataaaaatc aggaaagcat tgctgaagag gtgatattta caagagtggg aatgcctgtg |
| 6661 | attacctagg aagaaagggc aggtgtagaa gaaaagagag ccagagtact tagaagttag |
| 6721 | gaaggcaagg agaggggcag ccaagaacct gagaaagcct ggcgcaggaa gttgaagaca |
| 6781 | aagaacaacc aaaggaatgt gggatcagaa gccaagagag aaggtttaaa aaaaaaaaaa |
| 6841 | aaaaaaaaaa agcatagagg ggctgagagt gttgaatttg cctgaggggt ggggtatgat |
| 6901 | gaaggattac agactgcttt taagaagttt tgccatgaat cagagggaga taagagatga |
| 6961 | agacagagtg aagggagaat ttgtttttct taatatggga gatactagaa cgtatttgtg |
| 7021 | aaccgatagg aatgacctag tagaaagaaa gagatctgtg gtgcaagaag tacaagagaa |
| 7081 | ataactagaa gcaaagtagt aaaaaggggc aaacgtggag gggtttgaga atggaactag |
| 7141 | gagaactact ccttaaaggc aggagggata tttcttccat tttcaaagga agatagccca |
| 7201 | aatggtgcag atgcagacgg gtttgaaatt ttgatgaaaa gtaacttggg agcatctcat |
| 7261 | gcattctgtg ttttcgatta aatgcagaat atgtccctta actttgagtc tggtggagaa |
| 7321 | gggtttgggc agattgaggt aagtagggga ggtttgaata gttgtctcaa ggagaggaaa |
| 7381 | ggcacacccc ctgaggaaat gtaactgggt ccccaggcag tgttgagtgc ccatctagca |
| 7441 | cttgtggtca cacattttac atgaaattgg ttagcccaga tgtagatgcc ttcagtccag |
| 7501 | tttatctagc tgctcaaagg ctctcatgga taaggtagat gtttgaggtc agccaaattg |
| 7561 | gggttttgcc agacaagaaa aggaaggaaa gagagagtga aaaaagggag ttaagaatat |
| 7621 | ttgcaaaatt ccatggaatc tgtgtgggca agggtggaag tgaagacagg aaggtgtgga |
| 7681 | ggatagagag aaagtggatc ggttaattaa ttagaagcct cgtgagcaca aataaatgtt |
| 7741 | gcaataagga ttctgcagta gatgagctgg aaggtttgga ggctgtagct ggagagaggc |
| 7801 | tcaaaattca gattttggag gtggtggtgt ggtttccagt gatgacaatg tccatgccac |
| 7861 | aaccactggc tgagcagctg agtagtagaa caactccgag aagaccagct caggttactg |
| 7921 | ggaagccagg aagttgctaa ggatgatggg atctttgtga tttttgttat taaaacaaat |
| 7981 | tcccatcaga cagcaaaaga tcgatgcaac ccttgtagtg ctatttttat tcacaacttt |
| 8041 | aaggagtctg ctgtctgctt tctccttttg acttttatgt atttgtttgt ttaaacaaca |
| 8101 | gaaatttatt tctgcaacat gaaggtgcct gtagattcag tttctggtga cagcccgtca |
| 8161 | ccttgctgcg tcctcacatg gtggaaggct ttacctttag aagaaattta aatttaatat |
| 8221 | aaatttcaac tgtttattag cacctgcttt gccagtattt gtcaccatgc tataaatcat |
| 8281 | gactaccaac agagaaattc tatcatttaa atcaatggct cagatttctt ctaatttttt |
| 8341 | ttcttttttg agactctttc tcacacaggc tggagtgtag tggtatgacc ttggctcact |
| 8401 | gcaaccactg cctcctgggt tcaaactatc cttgtgcctc agcctcctca gtagctgaaa |
| 8461 | ttacaggcat gtaccaacac ccccagctaa tttgtgtatt tttagtagag acgagatttc |
| 8521 | accatgttgg ccgggctggt cttgaactcc tggcctcagt gatcttccca cctcagcctc |
| 8581 | ccgaaatgct aggattacaa tcatgagcca tcacacctag ccccagattt ctttacaaat |
| 8641 | tgtgtaattt taaaactgtt gtaccaagtt tctttataat aaagatgatt ccagtatatt |
| 8701 | tgagtagtag tggtccctaa atgggacact ctgtatgaaa actgaaaagt tccccttttc |
| 8761 | caggcatatt aagaactgca gagcccagtt tggggaaatg gaagtttgag aaggacttga |
| 8821 | aaaatgtcca tatgaaatag acaagttgtg ctttcatccc ctgctccttc ttttcttatc |
| 8881 | ttccttctgt ggagtcacct tcctatttta ttccatgctg ttgggactac tgactattgc |
| 8941 | aattcctgtt tgtaatttac atattaaaac aattgtacta atagatatat ttttctagaa |
| 9001 | tacaaactcc actagggcag agactttgtt ttaacagtgc ctgacacatg gtaggtgcat |
| 9061 | aatcaactgt tgttgaatga atgaatgctt attgtagaaa actagaaaat acatataagg |
| 9121 | aacatgaaaa aatacctcca ctacaaacta gaagtctcct ctgatcctac catacagata |
| 9181 | acccattgat atttcagtaa atatcttact aggcacataa atacttatct atataaaagt |
| 9241 | ataatgaaat gtctggaaat aataagcacc aaattcagga taattgttgc cttctgaggg |
| 9301 | tagagggagg aaagaggatg tgattgagga agagtatact gagagtttcc gctgcattgg |
| 9361 | cagtaattta tttcttaagc tagatgatgg atacatgaaa gtttattata ttattcattg |
| 9421 | tgtattgtgt ttcttgtata tgtaaattac ttcatatttt attcaaaata cctccagatt |
| 9481 | tttttttttt tttgagatgg agtcttgctc tgttgcccag gctggaatgc agtggcgcaa |
| 9541 | tctcggctca ctgaaacctc cgcctcctgg gttcaagcag ttctctgcct cagcctcctg |
| 9601 | agtagcbggg attacaggtg cctaccccca tgcctggcta atttttgtat ttttagtaga |
| 9661 | gacggggttt caccatcttg gccagggtgg tcttgagctc ctgacctcct gatccaccca |
| 9721 | cttcggcctc ccaaagtgct gggattacag gtgtgactca ccgcgcccgg tccctccggc |
| 9781 | tttttttaat gcgtacactc ccacaggctg gagtgggagt gtatttttta caaaagagga |
| 9841 | agcatacata cctatcagtt ttgaatcttg attttactca cttttttccc tcttacttca |
| 9901 | catctctcca cgttactgaa tgtacttctg agcatcacat caatttcatt tcatagaatt |
| 9961 | acgaagtatg aagcataact tagttaacca cttccctgct tggggacatt catctgataa |
| 10021 | gtaatattga gtgtgtgggg gccagcatat tcaggcbgtt gccattttta ataaactact |
| 10081 | ataaatgtaa ttccttatta atgactcaag agtgaaaagg cttgattttc tctcattgtg |
| 10141 | agtgagtgaa gggtgaggag gtaaaacgga gtaagatatg ctggctacct aagtatttaa |
| 10201 | ccaaggaaaa gaatgtcatt atcctcttct aaccctcatg taaactagaa tgttgatttc |
| 10261 | tctatagcca ggcattaatg ggtctggggg ctgctgccat tgcctagtgg aggagttggt |
| 10321 | caacttcatc agggtagagt tgtcttgtct gctgctgagt ataattatca tattttttct |
| 10381 | ttgggtctaa cttttcttcc ccaccaaaaa aggagaaagg gcagtgtaac aatgactgtg |
| 10441 | tccctcagaa cgcagagaaa tattgagctc agacacaact gcctctgtgc aaaactggtc |
| 10501 | tgagcctttg gagtgaattg accaaaactt ttttttttct tttttagaca taaggtcttg |
| 10561 | ctctgttgcc caggctggag tgcagtggca cgatcatagc ttgctgtaac ctcaaactcc |
| 10621 | tgggctcaaa caatcctcct gcctcagcct ccttaataac taggactaca ggcgtgaacc |
| 10681 | aatatgctgg gctcattcat tttattgtag agatggagtc ttgctatgtt ttccaggctg |
| 10741 | gtctcaaact cctgggctca actgatactc ctgcctatgg cttcccaaag cactgggatt |
| 10801 | ataggtgtag gacaccaggc ctgaccaagt ttttaatcaa catttgactt gattgttttt |
| 10861 | tcccactgat ctgattggtg gaagactgaa ttactgatca actgagtcca ttcatttgag |
| 10921 | caggtgatgt ttgtagatgc aatcattgtt ccaggtgatt tggatcctgt tctgcatcct |
| 10981 | agcatagcca gtctgtatgc aagataagga gaccaactca ggacaggctg atctgttgaa |
| 11041 | actgtaaatt gagagtatct gtgtaaaggc ccttctttct gcagtagaaa gacagatgct |
| 11101 | cctctacttc tcatgagtta catcctaata acccattgca agttgaacat attttaagtc |
| 11161 | aaaaatgcac ttaatacacc taacctatgg aacatcatcg cttaggctat cctacctgaa |
| 11221 | atgtgctcag aacacttaca ataacctaca gttgggcaaa ataatctaac gcaagcctat |
| 11281 | tttataataa agtattgaat atctcatgta gtttactgaa taatgtactg aaagtgaaaa |
| 11341 | acagaatggt tgtatggtta cttaaagtat ggtttctact gaatgcatat tgcttttgca |
| 11401 | tcatcataaa ggcaaagtca taagtggaac cattgtaagt tgaggacttt ctgcatactg |
| 11461 | taactttggt ttgtgaatgt aatcactttg catgtgcttt cagggatggc atatgcccta |
| 11521 | ctagctgcag ttcctgtcgg atatggtctc tactctgctt ttttccctat cctgacatac |
| 11581 | tttatctttg gaacatcaag acatatctca gttggtaatt ataagtatat tttacaatta |
| 11641 | tatttgctca tgtttaaagt gttttggcta tattaagtgc attatacctc tattaggttg |
| 11701 | gtgcaaaagt aattgcggtt ttcacaatta tacttttaat tgtgaaaacc gcaattactt |
| 11761 | ttgcaccaac ctaatatatc tgtgttaatg ttgtcaggga aatgggattt cagtgttttg |
| 11821 | cctgcttttt ctattcactg atgttaggta acttttttaa tgaagtggaa aaataaaaaa |
| 11881 | actgaaaatg acagcctact ttaacatttt agcatgtttt gctttttaaa aacgtgatca |
| 11941 | atttgactcc atttttggag tcataatgac agggaaaaaa tgacacaagg tctttgaacc |
| 12001 | taccatttta ctggattaac ttagaaatta ctaagtatgt tcatcaaata catgttcatg |
| 12061 | atttaattaa agagcatact tattttaaat cactaatatt agaagactgg caaaatctta |
| 12121 | ccaaaacaat ttagaagcta agcttggctt tctttcttgg tatggcttat aataagtttt |
| 12181 | cctgctattc ctaaaatttg aattctcgtt tgttagaatg tcctagtaaa tgagtgtttt |
| 12241 | aatgctattt tgtgactttg acatttatac tagagaaaat tttgctccta catccatctg |
| 12301 | ctggctagac atgtctacct cgatgatcct cttgaaataa atgcaaccat ctactttatc |
| 12361 | cccaacccat gtttttgtcc ttagttgtat ttccttagaa ggagatcaga aagaggtttt |
| 12421 | gattgaaaga acttccacac cttggagaat caatcagtgt tgagtgcttg actagatgag |
| 12481 | gaacatggaa gcbggttttt ctctttggta ttctatacat tgagatattc caggtgactg |
| 12541 | gggttgggtt ttgagacctc aaaaccataa agccttccat gatgagaggg tagaatcatc |
| 12601 | atcatcgtca tggataaaaa taacagtagt gaacggagca attgctgaaa aaaaaatatt |
| 12661 | ttttaaaata taaaatctta cagattgaca tttgatatga aaaaatgttt tgtcttacaa |
| 12721 | aaagagaaag aaacttcata ctccctttgc tgttttttta atcctaactt cgaccctgtg |
| 12781 | atattgatca aggtactcag atccacagag atcaggacat tggacactct aggaaattaa |
| 12841 | tgagattata tgaaataaaa gttgagcgga acaagtaaac actcaatgta tgtgctacct |
| 12901 | ttgccagaaa acctttcctg acaactctca tccctgtccc caccacccat acacatgagg |
| 12961 | atcacacaca gacaggttag acgacctttt gatatactca cgaagcatcc tgaatgttgt |
| 13021 | attctaataa ctacctacgt gtctctctcg cctatttcta ggtcatgaat gcctcgagat |
| 13081 | atctgcgttt ttagcttctt tttgttgttg ttgagacaga atctggctct gtcacctagg |
| 13141 | ctggagtgcg gtggcgtgat ctcagctcac tgcagcctcc acctccccag ctcaagcaat |
| 13201 | ccccccacct cagcctcccg agtagcbggg accataggca cgcaccacca cacccagcta |
| 13261 | atttttgtct tattttggta gagatggggt tttactatgt tgcttaggct ggtctggaac |
| 13321 | tcctgggctc aagcgatctt cccacctcag tctcccaaag tgctgcggtt acagatgtga |
| 13381 | gccactgggt ccggctcagc ttctttcgtg aacaaacaat attttcctag tcacagctaa |
| 13441 | atcttttata cattttttaa accctatgca gacacattga acatttgtga ttaataactg |
| 13501 | attaattgtt agagactttt tttccccagg accttttcca gtggtgagtt taatggtggg |
| 13561 | atctgttgtt ctgagcatgg cccccgacga acactttctc gtatccagca gcaatggaac |
| 13621 | tgtattaaat actactatga tagacactgc agctagagat acagctagag tcctgattgc |
| 13681 | cagtgccctg actctgctgg ttggaattat acaggtaatg aacttacaag taaaatatag |
| 13741 | atggatgtaa tttttatttg aaattaactt taaagcatat agacttaaag attctactaa |
| 13801 | aaacaaaaca aagtaatttc ctggaaccca aaattatttt ctaaattacg ttgttttagg |
| 13861 | tcaggtgcta aaatagtaag caagacccca cttattaagg ctcacttatc atcaaagtca |
| 13921 | gagacagaaa aaagcacaga agaacatgtg tgattcaatt gaggatgaga gaagggaaat |
| 13981 | atacgggaat ccataaagga gaaaaagtgt tctggtgagc ggagacacag gaccgaaagc |
| 14041 | cacataaata agctctgggt ttttgctttt ctaagtacat gtatagaaat acttcaaggt |
| 14101 | ttttattaca cttagttttc aaattttaga gtggtggagg aaggggagtg atagggtatt |
| 14161 | aagaaattca tatttttttc taccagtatt tttgtgctat aggcaggcta ctagtgtttt |
| 14221 | cattggtatt aagcttgatg taatatttcc agagagtagg tttctatctc aggcaaacat |
| 14281 | ttaatttttc tttccttttc cttatcgtag ttgatatttg gtggcttgca gattggattc |
| 14341 | atagtgaggt acttggcaga tcctttggtt ggtggcttca caacagctgc tgccttccaa |
| 14401 | gtgcbggtct cacagctaaa gattgtcctc aatgtttcaa ccaaaaacta caatggagtt |
| 14461 | ctctctatta tctatgtaag tgttgcttct tgctccaggg atgggtcact gttcattcca |
| 14521 | gaaacaattg tattcattct ctgagtctgg gccaggcgtg gtggctcaca cctgtaatcc |
| 14581 | cagcactttg gaaggccgag gtgggcagat tgcttgagcc caggagtttg agacgtgaga |
| 14641 | cctcatctct taaaaaaaaa aaaaaaaaaa aagaaagaaa gaaaagaaaa gaaaaagaaa |
| 14701 | gaaaaaatcc aaaaatccga aaatttgctg ggtgtggtgg tgcacacttg tagtctcagc |
| 14761 | tacttgggag gctgaggtgg gaagatctcc tgagccctgg aggttgaggc tgcagtgagc |
| 14821 | tgtgatcgcc ccactgcact ccaccctggg tgacagagca agaacctgtt tcaagcaaaa |
| 14881 | acaaaatcaa aacaaaacaa aacttgagtc tgggagcacc cacatttctt tctttctttc |
| 14941 | tttttttttt tttttttgag acagagtctt actctgtcac ccaggctgga gtgcagtggc |
| 15001 | atgatattgg ctcaccacaa cctccacctc ccgggttcaa gcgattctcc tgcctcagcc |
| 15061 | tcctgagtag ctgggattac aggcgcccgc caccacaccc agctaatttt tgtatattta |
| 15121 | gtagagacag ggtttcacca tttgggccag gcbggtcttg aactcctgac cttgtgatcc |
| 15181 | acccacatcg gcctcccaaa gtgctgggat tacaggcgtg agccaccgcg cccggcctgg |
| 15241 | gagcacccac atttctctat gcatactttg ggagccattg aaaacatttg gttgcttctg |
| 15301 | tcagaaatac tattgtactt aaaaacatta atgaaaacaa agtggtctaa tgaagtaaag |
| 15361 | gctgctctgg aatgtaacag acttgatttc tagcctcagc tttgtctcta acaggtaagt |
| 15421 | gaccctggat acatcatgta gggtgctaat tgaaagctca gttttagaac tggatggacc |
| 15481 | ttgattcata ttctggctct actgtctact agccatgtga gccaatcacc atgcctcagt |
| 15541 | ttccttctct gcaaaattgg gttagtaata gtatatgcct cattggattg ttaaataaga |
| 15601 | atagataagc acttggccca ggggcbggta cataacaagt actctaaata aaggagttat |
| 15661 | tttgaaatga ttatttcaag ccatcttttc ttttttattg gtgaaatgaa atgattggag |
| 15721 | atgtatctct aaaagctttt tctaaccata agagtccgta aaatgcataa tgtaaatgtc |
| 15781 | tcaacaatta taaatgaaaa ggaacattag attcagagat gattcaccat gcaaaagaaa |
| 15841 | tgcaaaagca ggatgtagat cacactaatt agatttgaaa aaggttttgg atctaaaaat |
| 15901 | gtgttctaca taaagcatgt tattgatgct tgaaaaatgg tgataatagt aacatgatgt |
| 15961 | catcctagct tggggggaat gataccatac aaaaataacg tgtcaacatt aagaatggag |
| 16021 | tttgagtctt taaagaccca cctattagct tctaaaacaa tgtaaggcca tgtacacata |
| 16081 | tctaagaatt ggtgagtatg tcaataattg ctcaatttta taacggtgcc ataatcccat |
| 16141 | actattacac tccatccatt caacaaatat taccaagtgc ttactacagg ccaggtacta |
| 16201 | tgctaagcag tgagaataga cagaggaggc agaataacat agtgaataag atcatgaggc |
| 16261 | caggtgtggt ggctcatgcc tgtaatccca gcagtttggg agactgacac aggtggatca |
| 16321 | cttgatccca tgagttcaag atcagcttgg gcaacatgac aaaaccttgt ccctactaat |
| 16381 | aatacaaaaa taattagaca tgcattgtgg cacgcacctg tagtcccagc tacttgggag |
| 16441 | gctgaggtga gaggatcacc tgagctcagg aagttgaggc tgcagtgagc cgagatcatg |
| 16501 | ccactgcctt ccagcctggg tgatgggagt gagaccctgt ctcaaacaac aataacagca |
| 16561 | acaacaaaca aaaaaccaaa aacaaacaaa aaagatcatg gactttgaac ttcaacagac |
| 16621 | ttgagttggc atcttggttc tccacccact acccatgatg tttatactca acttccctaa |
| 16681 | gcctcagtgt cctcaattgt aaaatgggag tagtaatagt agctacctct tagagcagtg |
| 16741 | aggattgaaa aagaaaatac gtgtaaggca cttagcacaa tatctgtcac atagtaagaa |
| 16801 | ttgagtttat tattattatt atcacagatg aatagacctc atgaagctcg ccgttcattt |
| 16861 | cctcgggacc cagcctatta ggaaacatta gcaaaagttt ttgattcagc attatatggg |
| 16921 | tcattcttga tatgtttttt cctgtcaaat cctcagtttt ctattaaaaa agaatttttt |
| 16981 | tttttttttg agacagggtc ttgccccatt gcctgggctg gagtacagta gcacagtcat |
| 17041 | agctcactgc gacctccatc tccctgtgtc aagcgattct tccccctcag cctcatgagt |
| 17101 | agctggaact acaggtgtgc accaccacac ctggctaatt ttctttttct ttgttgaatt |
| 17161 | ttagtagagg caatgtcttg ctatgttgcc caggttagtc tcgaactcct gagttcaagt |
| 17221 | gatcctctca ctttggcctc ccaaagttct gggattaaag gagtgagcca ccatgtccag |
| 17281 | cccatatttt aaaattaaaa ttaaaatttt aagattttat tttggtagag acaggggttt |
| 17341 | tgcaatgtcg cccaggctgg tcttgaaccc ctggcctcaa gcagtcatct tactgcatgc |
| 17401 | ctcctaatgt gttgggatta taggtgtggg ccactgcacc tggccaatcc ttagttcttt |
| 17461 | ttgagacctc tgactgcctt attttgacag gctctgtaac ttttgcagct cctggcacat |
| 17521 | cttgctttta cttactttta cattttctcc atcaaatgtt cactcattta ttccttcatt |
| 17581 | ctcattcatt cagtttatct actcaataaa cacatattga atacttacca tgtgccaggc |
| 17641 | actgttcact ccctatacaa acccagtgac tcattaacct accaagacat ctcttactga |
| 17701 | gtattctcac ctcactgggc aaacattgct aggccttcat ctacacagat cgcaggaggt |
| 17761 | ccaaactaat tgttgacctg ggtccatggc catttcagga cccctgcaga acaggagaaa |
| 17821 | tagttcttct ggtctcatag gattatgttt aagaagaaac tttctgcaaa tgatttcact |
| 17881 | ttgacaggga caaaagtgag caggaaacac tagaccaagg tcaaaaatag tttttaaacc |
| 17941 | aagtgcagtc attatgtaac ttacttcctg ttgaatattt ttcttgaaat ctcagtttag |
| 18001 | catacagcat agaattttgc aagaaactcc tcacaggcca cccaagttgg aaaaggtatt |
| 18061 | tcagtcatcc ctatatggtg gtgaatataa gtttgctctt ctgaaaaaaa aaaaaaatca |
| 18121 | gcaggtctga aaacgattgc atagggttaa atgagccgct tagtctctga acagagaatt |
| 18181 | ttgcttatga cattaccatt gcaattatac atgaaagaat ccttcaataa atgcagagta |
| 18241 | gtagaggatt ctcccagaaa agactgtaag attgttgtaa aatactttac ctggagtgtt |
| 18301 | aacttatctt tgttctaagg ttgcactttg gtttgtcctg ccctctcccc caaaaaggtg |
| 18361 | ctgacaacta gaagtaacaa atgcaaagaa ataggggaga aaatattaga agaaaaagaa |
| 18421 | atcagttaat ttacaaatgt cagagatact ggatgtagga ggcagaaggg agaatgacag |
| 18481 | ggtattggca gcaatttaga attagtcaat acccttgatg ctaccatgta gctactcagt |
| 18541 | tatctaagta aatcccagtc cacttagggg ttgatttccc accactcaat ttgaatggtt |
| 18601 | tgtctcagta gacaagggtg agagctttga aagccaccac taagcttgat tagatttgtt |
| 18661 | actttgtacc tatttcagta tgtaaaattt atacattgta ttaaagtaac actttaagga |
| 18721 | ttgatctata catgtataca caaaagatat ggaaggaaat gcctgacagc aaaaggtggt |
| 18781 | cgtgaagcat ttgtgatatt cgtagagata aaataaacaa aaataaattc agttccaata |
| 18841 | gtaaactgat caattttctc atacacatta ttgggcataa ttttttctta cggtttcata |
| 18901 | aacacaggta atcctgggca agaacaaaga aattatctaa atgaaattgt cctaaaattt |
| 18961 | tccaaacaca gcaggaaata taataaaata ttatctatta ccaaaaagtt cattatcata |
| 19021 | atttgaatta tttggaatac taagctaaaa tacagaatta tatgtgtatc catactatta |
| 19081 | acatacttta tggtatttta acagtaaact aaattagaag tactgttcag tgtttttgta |
| 19141 | gagtctaatt tctatgtcgt taaatataat cttatattat tatataatat aatcttatat |
| 19201 | tattatataa tcttatatta ttatattata taatcttata ttatataatc ttatcttata |
| 19261 | taatcttata ttatatgctc ttatataata taatcttatt atataatctt atcttatata |
| 19321 | atataatctt attatataat ataatcttat tatataatat aatcttatct tattatataa |
| 19381 | tataatctta ttatataata taatcttatc ttattatata atataatctt attatataat |
| 19441 | atattcttat cttattatat aatcttatct tattatataa tataatctta tcttattata |
| 19501 | taatataatc ttatcttatt atataatata atcttatctt attatataat ataatcttat |
| 19561 | cttattatat aatataatct tataatataa tcttaactta ttatataata taatcttatt |
| 19621 | atataatctt atcttattat ataatataat cttatcttat tatataatat aatcttatat |
| 19681 | tattatataa tcttatctta ttatataatg ttatattatt atataatctt atcttattat |
| 19741 | ataatgttat attattatat aatcttatct tattatataa tcttatatta ttatataagt |
| 19801 | ataatctttt attatattat tacataatat ataagtataa tcttatatta ttatataata |
| 19861 | ttattattat acaataataa tgtaaactga ctattgcagt ttacatggtg agttttattt |
| 19921 | ctgcacagat taaactttct atcatagagc tcttcttaaa agattctgaa tgactactca |
| 19981 | atatgtaggc aacttattta catactcaga taccttgcat gatgcaattc tgtaatataa |
| 20041 | actgattttg gtttttgaac ctcgtgttac atttctaatc caccagacat actttttatt |
| 20101 | caaaggtcta attgattctc atggattaaa ctggaatcct gtagtgatta tttttgtaag |
| 20161 | gtaaaaatgt ttgtgtgatt gggataatga ttccaaatgt tttgtttttc aagttttaat |
| 20221 | ttttgcatct tgagttgaaa agtacacctt taatgaatag acaattcatc aaaatgttat |
| 20281 | acctagctcc tgaattaatt agggtcattc atcagaaaac tgattatgta aaggaccaaa |
| 20341 | cagcaatgat aaccttcaag cctctgggat aggtagggct gtttgctcct gtgctaaatg |
| 20401 | ccctaagttc ttgttatcgt gtctgcbggt ggtagttatc ccattttctt tttcactctg |
| 20461 | ctgtccctgg catcatcttg tttctgtcag tgtaaatgcc tttagcaatt ttcagtgact |
| 20521 | ctgaaaacca gacaaagtga atttgttagt actggatttc aagaaagagc aaaagtaccc |
| 20581 | tctgagtgaa agttcaagag tcttcctaca agttaaatgc ctgaactcta gtccaagtgt |
| 20641 | ttggtgggag gtattttgca tgcataatag cttctccccc atttccttac tcttcttgaa |
| 20701 | tgtgttccag agagctgagg ttgctggcaa agtgactcct agattactta aggttcatta |
| 20761 | agtacttaaa gttcattaag ctcatacata attgtcacca gattatcatt ataattattt |
| 20821 | taaaagtagt ttatctgtga aaataagtaa aatacatttt ataaatgtta taaactataa |
| 20881 | gatgctccat tattttatct tcctataaaa tatgtctata aaaaagctca tttaaagaaa |
| 20941 | agttaccttc actgtgagat tgtctcaaag aaatgtctca aagatacctt cttaaatcct |
| 21001 | gccttctaca ggactgaagt taatataaca aagatattag tgttcttcct tgggattctt |
| 21061 | ccttgctaat ttccttgaaa acacccttga ttcccagaag tctcctattt acaaaacaaa |
| 21121 | actagttttt cttgaattga ttcatctgtc tacttaaaga ttttttttgg ccagttgtgg |
| 21181 | tagctcatgc ctgtaacccc aacactttga gaggttgggc aggaggattt cttgaggcca |
| 21241 | ggagttcaag accagtctgg gcaacaaagt gagacaccat cccctgcccc cacctcctcc |
| 21301 | cgccccaatc tctacaaaaa ataaaatagc ctatttattg tactctctac aataaataaa |
| 21361 | ataaatatag atgcctgcct gtagctccag ctactctgga gggtgatgtg gaaggattgc |
| 21421 | ttgagctcag gagttcgagg ccactgtact ccagcctggg caagagagct aaaaaaaaaa |
| 21481 | aaaaaaaaaa aaaaaatttt ttttatgtta tcttagttca agtttgagaa ataaaattaa |
| 21541 | gtaccaaatt tattcccaaa aatgtatgct tgtcaggaga tatacctaat gttaaatgac |
| 21601 | gagttaatgg gtgcagtaca ccaacatggc acacgtatac atatgtaaca aacctgcacg |
| 21661 | ttgtgcacat gtaccctaaa acttaaagta taatttaaaa acaaaaaaca gaaaaaaact |
| 21721 | acagattcaa ttcagcttta ggaattaaaa aaaagatttg atgtaattat atcattataa |
| 21781 | aatcaaattt tttaaataaa acatgaaatt gttttaattt aaaaaaaagt atgcttggcc |
| 21841 | tatatgtcaa ttcaatagct tttctttgcc agaaagaatg aagtcagtct acctgtatcc |
| 21901 | acatatgaag tattttagga ttttttgtaa ttttttgtta ttatctatat cattcaggtt |
| 21961 | taggaaagaa ctttacctaa aatactggct aattgtgccc caaaaaaaag aaagctagaa |
| 22021 | agaaagaaca cacacacaca cacatacaca catatacaca cacaaaaaaa acaaccaact |
| 22081 | gatcaactgg gagtttcagg tttatcagcc tttagtctca atgctgtatc actgtagtaa |
| 22141 | aaatcaggct acttgatagc acctagaaac ccattttaaa atataaactt gtaaagcatt |
| 22201 | tctgtaagta aaagttagta tgtttataat gacatttttt cttttaagac atctttatta |
| 22261 | ttatcataaa aaatacagag aagcaaaaat aagaatgtag aaatcaccca gtttttcctt |
| 22321 | tccaagtaaa caatcataaa aaacttggtg tatatatata ttgcagcaat tgtatgtatg |
| 22381 | taatggtctc tgtatcaacc aacacatttt tatcatttta ctgaaacttt tgagtgttgt |
| 22441 | ttgatgctga tatcatggtt tttcatgtgg gaagattcat atgagaattg attgtgtgtg |
| 22501 | tgtgcgtgtg tgtgtgctcg tgtgcgtgta gcagcaggaa gtatataaaa ttattttctt |
| 22561 | tttatagacg ctggttgaga tttttcaaaa tattggtgat accaatcttg ctgatttcac |
| 22621 | tgctggattg ctcaccattg tcgtctgtat ggcagttaag gaattaaatg atcggtttag |
| 22681 | acacaaaatc ccagtcccta ttcctataga agtaattgtg gtaagtagaa tatgtagtta |
| 22741 | gaaagttcag cattatttgg ttgacaaaca aggaattatt aaaaccaatg gagtttttaa |
| 22801 | catcttttgt tttatttcag acgataattg ctactgccat ttcatatgga gccaacctgg |
| 22861 | aaaaaaatta caatgctggc attgttaaat ccatcccaag ggggtgagtg tggtgttcct |
| 22921 | cttagtacta atacattaag tcagtaagtc agtctttttt atttaaataa aaccttttat |
| 22981 | tacaagcttc atttcactga tactccttca atagtcctat ttgtgtgtga tctggaagaa |
| 23041 | acaaccataa gacaaacagt atgtgtgtag ataaacgtca agccatttgt ttaaaagcag |
| 23101 | cccgtatatg ctcttttttc ttcattttct taaaacatgg cagaacatgt acggttaaca |
| 23161 | ccagagtcct gatttaaact tatacataac attataatat aatataaata gaatcatttc |
| 23221 | tcagtaacat ctattgcact gtgaacaatc tgcttaagga atcagggacg tctggcctaa |
| 23281 | attctctatc atttagttta atcaattttg gataataatt atatcctcgt acccataagt |
| 23341 | aaaatgcatt atcttcaagg gaagttttag aaacatttgg tagtttggtg aattagaaga |
| 23401 | gtaaaagatc aaggtccttc attcatctct gtcaccttcc agttttgtga cctgaggaga |
| 23461 | ttctcctata taagacaagg ataatgaaaa cagccgaagc ctcaactcaa gcttattatg |
| 23521 | aaacaccagt gagatctctc atgaaatgaa gagtagtcaa gacaccctac accataattt |
| 23581 | tctcatatgg ggttacaaag gaggcctaga cgtttattat atttgtaaca tacactcata |
| 23641 | acatttaaga ctagacttgc tgttaatcaa gaagtactag ttttccctaa gactggaaga |
| 23701 | gtttggtacc ggtgtttcta ccaggaaagg gagtggaggg gagggaaggg cacggagcca |
| 23761 | ctgtttggta ccagtgtttg ttttccatgc tcttaataga aacttcctca ggcaagctta |
| 23821 | ttcccagagc ttattctaca gggaactgct gtattcccat ttgatgaatc ttataatttc |
| 23881 | ctctaatatc tgttccaaac tatttgaaaa agcacagctg gctacatggg acttaatttg |
| 23941 | catgctatcc attacagtgt ttctcaaact tacccttttg taagaatcac atgggatcct |
| 24001 | ttttcacaca gattcctggt tcccacccca aacctattga atcaggcttt ccagaggtgg |
| 24061 | ggctcaggaa ttaatatttt tcaaaagtgc ctcaagtgat tcttgccctc aaggaaactg |
| 24121 | gagaaactct ttaagagagg atcaacaaat ctaatctaac aactagataa tttcattagt |
| 24181 | tagaaacaat tacagaaaaa gatactttac agatctcttt tgtcaggctt cctaggatgt |
| 24241 | atcaagttat aggtggtcca cagagcaggc cctgtcccat ccatccgtgt tccattagtt |
| 24301 | ggtttaggga actcatttct tctgccctaa attatccctc caggtcctct gcagagcttt |
| 24361 | cctgtgctct cctcctgaga acagatttct agcctctcgc ccttgagttt aatgaagctg |
| 24421 | aatcctttga cagaccacct ggtcagcttg gtcagctaat ttaacctgcc tggccccagg |
| 24481 | gactttaagc tactccatga gggcagtgac cccattggtg ttgttcagct ctgtcccaga |
| 24541 | gcacagagct catctcacag taagctctca gaaaacactt gttgaaggaa taaaataccc |
| 24601 | aagcctatgt cattataaac aagccacaac aaaggccttg gttatctgat ctcacttggt |
| 24661 | agcacagaag caattctgat gatattaaca aacctgaaaa agaaagggag tggagagatt |
| 24721 | ggaaaaaagc aagcagagtt ttaaagtggc cctgaggtga gcacagtgaa aggaagaggg |
| 24781 | acagagagat tgtgatatgc ccccttttga tctcctccct gcttcaatcc tccattaagg |
| 24841 | ctgctgctcg tagttccctt tatcctattg agggtccata agttaggatc actcctaacc |
| 24901 | taggaccata cgttaggacc ataagttagt ccccaataac aatgccccat tggacagcca |
| 24961 | aaaacagtgg ctccatgccc ttccctctac tccctttcct ggtagaaaca tacaactttt |
| 25021 | ccttgtccag tcaacaccta agcgccccac taggattcac tcattctccc atcctgggtg |
| 25081 | ctttcttaac cagcagacac tatgagggcc agtcatgtgc ctctcttctc atgcaactgg |
| 25141 | tccttatctg caactcgtaa tctgcccagt tcctcactca tcctgcccag gcttctcttt |
| 25201 | tacctcttct gttatagtgg tgtgtgtgtg tctgtgtgta tgtgtgtgtg tgtgctcacg |
| 25261 | cacgtgtatg tgtaaaccca taacaagatt gacagctctg tcctctaaat tttaatccct |
| 25321 | attcactctc ttgcctcctg tccttgccag ttccagaggt ccccttgttg tcatgtttgt |
| 25381 | tactctcttt tttcttttct tttctttaac agagtctcac tctgtcaccc agcctggaat |
| 25441 | gcagtggcat gatctctgtg gtgtgtgtgt gtgggtgtgt gtgtgtgtgt ataaacccat |
| 25501 | aacaagattg acggctctgt cctctaaatt ttaatcccta ttcactgtct tgcctcctgt |
| 25561 | cttcgtcagt tccagaggtc ctcttgttgt catgtttgtt actctttctt tcattctctt |
| 25621 | tctttcttcc cttccttccc tcccttccct ccctttccta ccttccctcc cttccctccc |
| 25681 | ttccctccct ttcctacctg cactcccttt cctccccttc ctaccttccc tccctttcct |
| 25741 | ccccttcctt ccttccttcc tctctctctt ttttctttct ttctttcttt ctttctttct |
| 25801 | ttctttcttt ctttctttct tttctttctt tccttctttc tttctttttc ttttcctttc |
| 25861 | tttccttttc tgaaacagaa cctcactctg tcacccagca tggaatgcag tggcatgatc |
| 25921 | tcggctcact gcaacctctg cctcccaggt tcaagcaatt ctcctgcctc agcctcctga |
| 25981 | gtagcbggga caacaggcac acactgccat gcctggctaa tttttagtag agacggggtt |
| 26041 | tcaccatgtt ggccaggctg gcctcaaact cctgacctca ggcgatctgc ctgcctcagc |
| 26101 | ctcccaaagt gcbgggatta caggcactgt tatagacccc ttttgtcagg tttcctagga |
| 26161 | tgtatcaagt tataggtggc ccgcagaaca tgccctgtcc catcaatctg ggttccattc |
| 26221 | attggtttgg ggaactcagg cctactgttg tttttaaagt atgtgctttg cagttgtact |
| 26281 | tgaaagtgtg gcacaggggc aaagccaaca aaaccacagg gtttttttcc tggctgcttt |
| 26341 | ctgagggcta ctcttctcct ctagctggag tggtggtgca tttgccaagt gttcagaccc |
| 26401 | agtctgaagt actctggtat tctgtttggt attctgttta tgacgctggc ctgtcgtttg |
| 26461 | tggaattttg ggcccttcag ggttcacttc tcccggtctt catcttttca gataagtgtg |
| 26521 | tgttcacatg ctcactccct tgggctcttc atagtgttgt cttatgatca ggcctgacat |
| 26581 | gcttggctgg ggccaaacag gcccactgag caaaaaattt ggagagttat atccacagaa |
| 26641 | ggagggcaag ggcaagggca aggacaaaag gcttacttac aggtcattag aagatatcca |
| 26701 | gacgggactt caattggttt ggggcaaata attggcacac ttagggttca gcaagacagc |
| 26761 | agacatgagt ggcaggagta tgacagactt agattctccc aatatatacc aagaacctac |
| 26821 | tatatgtgta gacactaatt acttacttac acaagtgatt cctcattgaa tcatatgaga |
| 26881 | agaatatata gtccccattt gacagctgag gaaactggga tgtggtgggt ttaaataaca |
| 26941 | tgcctaaagt catttgagag tgattctggt cctttgactt aagtctttgc actttacact |
| 27001 | ttgcacacct ggataatcaa ggatcaggtc atatttggag aactaggcag ccaggcaggc |
| 27061 | aaagtgcatt aggctgctat caaaactaag ctgtatgtga aactggaaag ttatcctgac |
| 27121 | aagtccgagt gacctgaagt agggttgact gggtctcagg agcaagtcag gagcctgttt |
| 27181 | tgagaagtgt ggtcccaagt cacatcccaa ctagcaggtg atgtcatgct gagtcgccca |
| 27241 | actgttggat cagggtttcc aacatcctgt ctgtctacag atggggttca ttccacagtc |
| 27301 | tcattgbggg gtaggatggg atataaggag aaaaggagtc tgaaaattaa cctcactggt |
| 27361 | agggagagta aggctacaag ggcagagaac cagacagatc ttgttaggta ggaaatcgtc |
| 27421 | taatatctaa catttagacc tggacccact aactgacatc aagcaaatca cttcacgttt |
| 27481 | ccaggtctaa gttcctttat caacaagaca agacaagagt ggtggattca acaataccta |
| 27541 | ggatgctttc tctatggttt tctctaagaa ccttatttct attttatttt taccactgtt |
| 27601 | ctctaattat aggggaaaat gtagtttcct tattaaagaa actttaggca taagtgatgt |
| 27661 | aggtcgggga gacctttcat ggcbgggggc ctctggaatt ataccatatg gatagtcatc |
| 27721 | aagatatagg tccatctccc aaattttcat atttgagaga acctcgtggt ataatgtgta |
| 27781 | ggttaatttt tttatatggt ttgtagggta gctctggttt tgtcaaacag tagtcattgg |
| 27841 | accccacaat cactgagata ttttagtcac tatggagcgt tgtgataatt acattaattt |
| 27901 | aatctttttt gccttaagaa gattttaaat gtcctggctc tcaaaggatt ttccactgag |
| 27961 | ctcttttagc ttcatacatt ctttgtctct ttaacagagc tgatacctct tcaaacacag |
| 28021 | taaatctcat attatggcta gaatctcttt taaattcaaa gaactttaag atggaattgt |
| 28081 | ggaaggagaa acactaacat gtgaaatggc atggatgggg ctgtatgata ttaaagaatc |
| 28141 | agtaacagca gatttattca tgtgagagat agagaagagt cagcatggct aggctcaaaa |
| 28201 | atagaggaca aagaaatcag ccagtaagat aacaccaact tctgattaaa cattataaaa |
| 28261 | gctgctacta tcatgtatgt atttcgtgtg ctttttgttc ttttggatca agtactttca |
| 28321 | tgtctaatat gtgactgagc agatatagca tttgatgaga tggggaaaaa ggatggtggt |
| 28381 | caaatcttca cagcattttt cacttaaaaa ctcactaggt ttttgcctcc tgaacttcca |
| 28441 | cctgtgagct tgttctcgga gatgctggct gcatcatttt ccatcgctgt ggtggcttat |
| 28501 | gctattgcag tgtcagtagg aaaagtatat gccaccaagt atgattacac catcgatggg |
| 28561 | aaccaggtat gggtgccctt ttgctgaact ggttttatag ggctggaaac aggaaaaaaa |
| 28621 | cataaatgga aaagattttg gtgtcagcta aagaaggggt tggattcttt caccagacct |
| 28681 | tattgggttg gttttcctct tgtgtttgct aattagaaat tattttggaa tagacacact |
| 28741 | gcatcacttt gcttttttaa gaaataagtt gaaataacac taattttaaa agagctaatt |
| 28801 | cagtcaggtc ataaataaca ttcaaagtga acatattagg tcagaaagag aattcttcat |
| 28861 | gtaacccagt acctcttggc aattattttt aacggcagtt ataatgtgac aaaacagtgc |
| 28921 | aacaaacatt aataatagtt gtgaccactt taaattgagg tggttcactg tgcagttaat |
| 28981 | atatacaggc aatttttgta ggcatgtgat acattgccag gtaagctgat ttcacactgc |
| 29041 | ttgcaaattt gcaagttctg tatctatatg tttctgaaaa tacagtatag caataacagt |
| 29101 | agttaaatgg ttagtaatca agcagaataa cagcactgct agtcataata tgcttcatag |
| 29161 | tgaatattca accacagaaa aacactttat gtgagagctg cagacattcc attcactagg |
| 29221 | cagtgaaaaa gcttagcaaa tgatcaggtg ctatttcttg tcaactttaa aaattatcga |
| 29281 | gagcaatgag acctctctca gatggtatgg cgtccaaact cctgatgtcg tacaaggacc |
| 29341 | ccaagtacct atcacggtaa aaattaaatt ggaccaccac gcagagtagg catgggagtt |
| 29401 | ttcattctta atgtacttcc tgaaatactc agcgaaggtc ttgcaaagat tcaatttgta |
| 29461 | ggatcgttgt catccagtct cttccttagg aattcattgc ctttgggatc agcaacatct |
| 29521 | tctcaggatt cttctcttgt tttgtggcca ccactgctct ttcccgcacg gccgtccagg |
| 29581 | agagcactgg aggaaagaca caggtaggaa caacagcctt atgatatcca tctcagagaa |
| 29641 | caagtcgagg aatggcaaca gaggaaggct cgcaccgagc ttagcaggac aatttgcctt |
| 29701 | tcagacttgt acttcctaat ctgattcacc tcaggcctat tcctcttgtt ccactccctc |
| 29761 | acctgaaatc tcttaaaaaa caacatgtat ggttttctga tacagtgatt ctcaaatcta |
| 29821 | tttgtcagtg cttacctgtc atgtagctac acttacctgc tgtggtcaat aacaactgac |
| 29881 | aaggaatcag taatgaagga tgctgatttt tgttaatttg ttacctgggg agacagatgg |
| 29941 | cctggtaaaa gcgcttcctg gctttaggag ctattctatt ttcaggaaag tgaaaagctc |
| 30001 | tattcacatt tcctttagaa ggatcaggaa cttcctccag gggcgtttgg tcccacagaa |
| 30061 | caacagtttg ctagccaaga atatttttgt tgtaacattt ttggcatttc ttcctgagta |
| 30121 | agatttatgt tgttgaagtt ctgcatgtgg gtttaatctt atcttttaaa tgtggtttgc |
| 30181 | agttgttgcc tttacaaggt ggccaaaaag ccagcatcct agttaatctc tggataatcc |
| 30241 | ctccttcagt gttcagaaag ctcaggagcc atactcaaag gccactcttt ccagcaggac |
| 30301 | acagtcgaag agaccacacc aagcagatgg gcacaagaga cagactcagg aattttgctt |
| 30361 | ctgtctctta tgccttgagg tccttatctt cccaacacag aaagaactat tatttaggag |
| 30421 | taagaagtgc attgagactc caaagaacaa caaacccaaa ctacatagtg caatacacac |
| 30481 | acacacacac acacacacac acacacacat gcacacacac atgcacagtc ttcacagtct |
| 30541 | tcaaatgggt tttactaagg cggggacact taaaaaataa atataagtcg ggcacagtgg |
| 30601 | ctcatgcttg taatcccagc actttgggag gctgaggtgg gcggatcaat tgaggtcagg |
| 30661 | agttcgagac taacatggcc aacatggtga aaccccttct ctactaaaaa tgcaaaaatt |
| 30721 | agccaggtgt ggtggtagat gcctgtaatc ccagctactt gggaggctga ggcaggagaa |
| 30781 | tcacttgaac ctgggaggtg gaggttgcag tgagccaata tcgtgccact acattccagc |
| 30841 | ctgggcgaca agagctagac tctgtgtcaa atatatatat acacacacac acacacacac |
| 30901 | acacacacac aaacatatat atatatatat attctcatat atatatacga gaataactga |
| 30961 | aaaaactaat gactccaaca gtgacttgcc cagggagggc tttaattgtc cccaatatgc |
| 31021 | atgtgatgct cctttcctat ttataatgga tcttgtgaca gacttggaag aattggcctc |
| 31081 | ttccagtttt ttggctgctt ttcaacaaaa aattttattt tcagaatttt tcttaatttt |
| 31141 | ttattttttt tgcaaatatt tccagctctg agggagcagg taaaataata cagctcatat |
| 31201 | ccggaggcat agccagagat ctgtggtcaa ggggaagagg tcagagccaa tttccaaagc |
| 31261 | tgtgcacatt tcaggctgca gcbgtcagca gcaggaactt ctgctgcttt catttgagac |
| 31321 | ggagcactga caagctctcc agagcacatg gtcttcagcg ggtgcaggca aatctcaaac |
| 31381 | tgctgatgtc cattctcctg atgttacctc caggctcaaa tgaggcatgg gctggctgtc |
| 31441 | ccagtaagta tgcccatgta aagtgacctc cttggcacag ggtttggggg ataatggtgc |
| 31501 | tctggtaagc taataccccc tgccacatac tggcatgtat tatatttagg aatgaaggat |
| 31561 | gccaggattt cagcattaaa gaatgaaacg agtaaagaaa tggcttcatg tttaattatt |
| 31621 | gaaatgtata ctaaattctg gggttaaaag tctaagtgcc tgaactgaaa tccagggact |
| 31681 | gatggacaaa taaactggca gggcttctct tgtgtggctt ctcgtgtttt ctcttatgtt |
| 31741 | ggaacttcag tttcagcatc tacaaaatgg aaatgataat tgcatccatt tcacagggat |
| 31801 | attgtgagga ttaggcaaga aaatgtaaag ccttagcaca tacttgtaaa tgctcattgt |
| 31861 | ttcactcctt taggcaagaa tagcatctta gcatctatga tacatatatt gtgcctggca |
| 31921 | cataagaagc acctggcata tatttgctga atgaatgaat ggaagaatga gtattggtgg |
| 31981 | acacgaactg tttttagcac atctacagat tgtagaagaa ttaaacattg gaaccttttc |
| 32041 | tttccctcac ccccatctga cttccactga ctcacagaaa agtaattctg attacaaacc |
| 32101 | actctttagc tctgattacc ccctccctta acagaataat tttttagtaa ctgaatctgg |
| 32161 | ttgtagatat aaagtctaca gagtttctca caaacaagcc ttatcaagta agtagaaata |
| 32221 | attgatcact caccaatttt aatatagtgg ccaaaatgag ccttggcctc ccataattgg |
| 32281 | agactcatta tgacatataa ttggcaagta ggtggccact ctcctggcat gagtttggca |
| 32341 | gctgactgtg gtccttgtcc ccaaatctcc atatctttct ccagttcaca gagctcccca |
| 32401 | tccacagtga gatgcaagtg gctcggtaaa tactggttga gtaattgcat gcaaggaagg |
| 32461 | aagggaggga taagggaagg aaagaaagaa gaaaatggaa ggaaggacaa gggagaggaa |
| 32521 | gggaagggat atgaaggaaa gcgaagagaa gggagggaag taggatatca gcttctctgc |
| 32581 | ttagtcagga gaagggaaag agcaccaggg tactgggaat ctaggatggg gataggaaga |
| 32641 | gcatagaaaa gccagccaga catacaaagc acgcttttta gtacctcata cacatcatat |
| 32701 | tgcctcaggc tgacccaact ataatctaaa tataaatgat caatttgcca ggtagagcaa |
| 32761 | gtgctttcta attttctgtt tatatttgct gtgtctgtct cccgtaactc agaccttttg |
| 32821 | cactagacag tacttgtgct caacaaaatc ttcccagttg tttcctctct gattgctttg |
| 32881 | cttgtagttc cctgtctcct tttcttcttt gtttcagagc ttctaatctt catcttggct |
| 32941 | ctgccccagc tgtctcaaca gagaattcat tggtcatcta atcaaacgag agagtagtcc |
| 33001 | ccaccccctc agcctctctc ctaactagta tggatcttag gagagctatt tttgccagcg |
| 33061 | aaggtaaagt ttctgaagct tccttttacc cctgctattg ccccgttact ccatagtcac |
| 33121 | tgtttcaggc tgccttgggg caaagctctg agcctgcctc cgtggaactg tcagaggagg |
| 33181 | caggagacac aatcccacct ctcaatgtgc aaatgtggca tttcgaattt gcaataggat |
| 33241 | gagtaaattt attttctctg agactttaat gagaccatgt gctacaagta cgaagtgtta |
| 33301 | tcagagttgc tattatagct gcagcttcaa taatgcagaa aaatcagcta tgtgccatga |
| 33361 | gaatttattt cccaagaata cgacaatgat ctctgttgtt gggaaagggg ggattggtcc |
| 33421 | atgtttcctg ccatggtaaa taactagaag cttggcctga atggacgccg aaaccgcagg |
| 33481 | tgtgtactat caccaaataa aatccctgtc aaactggctt taatttcata ggatcagtcc |
| 33541 | ccatattttc tttaacttct ctgccatagc atatatagat gccatttttg ttcagttttg |
| 33601 | tggcttgagc aaataactat cacttttctc gacagtattg agcagaaggg ggagacaggg |
| 33661 | aagtatgaag tgtgtctgtg aacaggctgt ctcatacaca catccagtga gctggaagac |
| 33721 | acaagggaga aggacgaatc cttttcatag gaggtgtgtg tcttccaggt tgctggcatc |
| 33781 | atctctgctg cgattgtgat gatcgccatt cttgccctgg ggaagcttct ggaacccttg |
| 33841 | cagaaggtat aaccctgctt ctctgcatac cgattgcata atttcccttc actactctgc |
| 33901 | taccagataa ataacaggag atttaacaat catcacatgg aaaaccattc cctgaataac |
| 33961 | acagccttct ctgtctctct tggcagtcgg tcttggcagc tgttgtaatt gccaacctga |
| 34021 | aagggatgtt tatgcagctg tgtgacattc ctcgtctgtg gagacagaat aagattgatg |
| 34081 | ctgtaagtca cctaccacct atatttatct gaaataagat ttggttctta tatgcttcct |
| 34141 | gccatatcac tatattcccc ccatccccta agtctcactt gtgctttggg aactccagag |
| 34201 | gagaaattag aattgbgggg ataaatcaaa gccatgaagt cttccatgtg aactgcattt |
| 34261 | tgtgaagatt ctgtatctct gggaaggtca atttccagca agaatcccat atgaggctca |
| 34321 | ttcatacacc tttggccttc taaacacaaa aagcaaaaaa atgtttaaac accctagttt |
| 34381 | agaaggacaa acaacataca aaacaatgca aaaacaaaat acaaaatgta aaaacccacg |
| 34441 | ctgactttaa ctctgactaa cataaccttt gcaactattc tgagaaacta aaaatcagaa |
| 34501 | gctaaatcct tcagagttcc tctctaattt aaaccataaa aagaatgaga agacttccta |
| 34561 | catattgata tggaaaattt tccaagacaa atcgttaagt gaaaaagaga ccagaataga |
| 34621 | aatgctgggg aaaagcacag acacaggcag aaataaaagc ggatacaagg agggagggaa |
| 34681 | gttgggaatg ggtggagaag ggggagggtt gtgagcaaga gttttcccct ttttaatgat |
| 34741 | aattccctta tgaaccatac aaatatatta gctattcaaa aatttagaaa taaataaaat |
| 34801 | gggacagttg gtcttaattg agaagcccag tttctacagc tacttaaata taaaatgaat |
| 34861 | gaagtcacaa tatttttaaa aagctgtgat ttggccaggc acagtggctc aggcctgtaa |
| 34921 | tcccagcaat ttgggaggca ggaggatcac ttgagctcag gaatttgaga ccagcctgcg |
| 34981 | taacacagtg agaccttgtc tctactacaa ataaaagatt aaaaattagc cgggtttggt |
| 35041 | ggtatgtact tgtgggtagt cccagctact tgggaggctg aggcgggagg atcacttgaa |
| 35101 | tccagaagat ggaggctgca gtgaactatc atggtgccac tgcactccag cctgggcaat |
| 35161 | agagtgtgac cctatctcaa aagaaaaaaa aaaatgtaat ttgtttgtgg atcattgatc |
| 35221 | ttatttttat aggtagttat cacatgatgg tacctgatac attaatataa ttcttttcat |
| 35281 | ttctattttt ttccctaggt tatctgggtg tttacgtgta tagtgtccat cattctgggg |
| 35341 | ctggatctcg gtttactagc tggccttata tttggactgt tgactgtggt cctgagagtt |
| 35401 | cagttgtgag taacgtaaaa cccagatttc ctataaacag aacaacacac tctgagcttc |
| 35461 | cttataccat tttgataaat atagtgaagc cactttcttt cgttatagtt actgtatatt |
| 35521 | gagtgcttct atgcattaag cagacagtgt tttacagaca tacttaatct tcaaaaatag |
| 35581 | cctatgaata gttttgatta gtctcattct acaggtgaga aaagagaaat tcagaaaagc |
| 35641 | taagaagcat ccctaagatc acacagctag tacgtggcag agctaagatt tgaacctatg |
| 35701 | tacctactca tgtcctctac tgcbgtgctc tccttttagt tgtggtaaga ctaaaaagta |
| 35761 | catagtttag ccaaaggctg aagttgcttt gtagtttctt ctttaaatga gatgaggaat |
| 35821 | gtaaggcgct cggccccagg cttgggacaa gacagcbgtt atatattata gttcattttc |
| 35881 | ttttttaaag ctagtaacca aaagttacat aacccagaac aggaggactt taaaatagct |
| 35941 | gatgacagcc aaaattcatt caaatctctc atataaccaa taaggcatat aaccaataaa |
| 36001 | ccacacaatt atgtgaagga aacaattagc tcatatgcag agtgaaggca gcaaagacat |
| 36061 | gatttaaata atggaaaaca gcctgtgagg gaaggtgagg agcctgaagg tggttttttg |
| 36121 | gttggttttg ttttgattct agagaggcct tagttaagtg ccctcctggg cctagagggg |
| 36181 | aacagagtct ttctctccct cctcaatgtg tccatcgtct ttccagactt ctggcccctg |
| 36241 | ctctgcctgt gcttgggccg tgaaagaaga agacacctgg aaaaacatca agatagatgt |
| 36301 | cttcagctta gcatccgctc acctctcctg tcccaccagc cagttctcct tcctgccctc |
| 36361 | cttccctacc ttggcatatt ggtgcctacc caaaaggctt gtgttttcta cctcagcatc |
| 36421 | ctaaatgatt gcccaagggc ctgagaaggt ttgcaggctc ccaaagttct caatttgctt |
| 36481 | ctaggacacg tctcagaaac gctccttaga agatgcbgtc tctcatgctg tatatgcctc |
| 36541 | agtgtctatt ttttcttgtg tggatgtggt tggaaaagaa gggttttaca gagagagatt |
| 36601 | agcttataaa cttttaagtt aaaaatcagc acaaacctgt aagccaagga ataactggtg |
| 36661 | gcacatttta gctgctagtt tggtatctag gcttttagcc aacaaaaagc agtatcctcc |
| 36721 | acagtattta atttccagta attatcatgc tgatccagag agcacaatgc tgaaagtaca |
| 36781 | ctaaacagat actctttctt caggaattgt atttagcatg tctctagtca cacatgaaga |
| 36841 | gtcacggaat ttatctgatt gcatcaggaa caagaaatca atagtctggt tgacaggaag |
| 36901 | gacttatttc tggtcctcca gtctcctatt tctataaaaa atgactaagt cacaaagaag |
| 36961 | cgccaggcac tggaagaccc aggggttaaa gacagaggct ctgctgccct ttacctccag |
| 37021 | gccttttctc acttctctta agaagtttag ttaacaataa aaatcaggat aatactgatg |
| 37081 | acctttcagg gttatggcag ggcttaaata agatttcaca tgcgtgaaag ctctatgctt |
| 37141 | atcctataac gtgttgtgca cgtgcaagta tgatgctcat tatttctctc agccatcaga |
| 37201 | agagaggcac agttctcccc tcccctgccg attccacaca aacaccagct gttcatttca |
| 37261 | gagttagcta caggaaaatg tcatctgcaa taaagacaga gtccaaaaca ccagaatgat |
| 37321 | gggctcttta gtagcbgttg tttttaactt tttattccaa aatacggctg ttccaaaaaa |
| 37381 | tcttgacctt gatatttttt cttctagtcc ttcttggaat ggccttggaa gcatccctag |
| 37441 | cacagatatc tacaaaagta ccaagaatta caaaaacgta agtacctttg tgagacattt |
| 37501 | gctggacttg ggtttactag cctgaagttt cagcagctcc attttacgta caaggtagcc |
| 37561 | aaagggagaa aatgcctatt gggaaagtct gttagtccac agggagtgtc atgaaaactt |
| 37621 | ttgatccagt gcaccttctg acacccatgg cttatgtgaa ttttgtctat gctagctgaa |
| 37681 | tgtctttttt tttttttctt tttagatgga gtctcactct tcacccaggc tggagtgcag |
| 37741 | aggcaggatc tcagctcact gcaacctctg cctcctgggt tcaagtgatt ctcttgtctc |
| 37801 | agcctccgag tggctgggat tacaggcagg tgccaccacg cctggctaat ttttgtattt |
| 37861 | ttagtagaga tggggttgca ccatgttgcc caggctggtc tcaaactcct gagctcaagt |
| 37921 | gatttgcccg tcttggcctc ccaaagagtt gggattacag gcgtgagcca ctgcacctgg |
| 37981 | ctagctgaat gtcattttaa tataaaactg ttgtaagagg aatttaaaaa taataggcaa |
| 38041 | tttctagatg ttcatccaaa attttgttta tctggtatat aattcttatc ttctgtaaga |
| 38101 | ttttctttat tcagttctaa caagagatta tcaagttctc tatgaccaag accttattat |
| 38161 | ttgacacttt gctttatcct tggtattaga agaaataaaa tatgacacag gaaatgaaaa |
| 38221 | acaaagaaat taaacatccc attgatggac ttgtgtcacc tgcaaataaa attgcttagt |
| 38281 | ggtgactagg ggaaacaaag ataaaaaagc agagaaagta aatcaagaaa atacaaattt |
| 38341 | agcaaataat aataataata atatcaaccc taggaagttg tagtctaatt ttaccttaac |
| 38401 | attaaaaaaa gttggacctt gaaactggga tttcagtagc tgctacttaa tttatttccg |
| 38461 | tgatctttct gttatgttga gccaagtgcc attaagagct aaaatgattt agagattttt |
| 38521 | ttggctttgg ggagggagct ctaagctgag ttagggaatt ctgacttcta ggctccatct |
| 38581 | tggtgagact ttgcccaagt cattcagcct ctcaggacct cagttttctc atctgaagca |
| 38641 | gctagactaa aattgctgat tcctgaagac tagaaaagtc tatgattctg tgattcctgg |
| 38701 | gttctatttt gggtgtggcc attgtatgtc agggtgagaa cagatgatat cataggcctc |
| 38761 | agttctgcaa atcccattga ttttgctttt tttctttgct acttttaaag aatgttagca |
| 38821 | aaatcaggag ggtcagtggt atgaacttca ggcaaatcat ggcactgttc taagcctcag |
| 38881 | tttcttttct ggaaatcaga gggttgaata aattgctttc taaggccctt tctaactttg |
| 38941 | accttctatg agactgtaga ggtccaagag tttttgtaac ctgttgtctc cctattcaag |
| 39001 | aaaagttgta gaggccgggc acggtggttc acacctgtaa tcccagcact ttgggaggct |
| 39061 | gaggcgggtg aatcacttga ggtcaggagt ttgagaccaa cctggccaat gtggcaaaac |
| 39121 | tctgtctcta ctaaaaatgg aaaaattagc tgggtgtggt ggcagcacct gtaatcccaa |
| 39181 | ctacttggga ggctgaggca ggagaatccc ttgaacccag gaggtggagg ttgcagtgag |
| 39241 | ccgacattgt gccactgtac tccagcctgc gcaacagagt gaaactccat ctcaaaaaaa |
| 39301 | aaaaaaaaag aaaagaaaga aaagttgagt gctgctaccc agctcctctg agcaactgtg |
| 39361 | acttgactcc ttgctaagta gccagaaatg taattaaata cttgaggctt gaaattattt |
| 39421 | aatcccagac aatttctttt aatgccagat tgaagaacct caaggagtga agattcttag |
| 39481 | attttccagt cctattttct atggcaatgt cgatggtttt aaaaaatgta tcaagtccac |
| 39541 | agtaagtatt ttatccctag aaatttgttt tctaacctct tttgagactt cattcattct |
| 39601 | acaagtattt actggggtcc aatcaggaat aggccctaga ccctcttccc tttgtgtagg |
| 39661 | gcaatgagaa ttaaaatata acatccttgc cttcaaataa tttacagtct atttggggat |
| 39721 | taaaaaaaca catatgttaa aacccaggta gtaataacta tgccagacaa aaacattaga |
| 39781 | gatgtttcta ggcagaattt gagtaagttt caaataagta gtatagacag ttgagagttc |
| 39841 | atagaaggaa gagatccagg ttagttggac taacaggctt tgtgcggcag ttggctgaag |
| 39901 | gaaagaaatc atgtcaagtg tttgagaact atgtgagctg agagacagtg gaaacatgta |
| 39961 | ttggaggtag ggttgcccag ttgcagcaaa aagtaaaata tactagtgga ataaataagt |
| 40021 | agaaaatcct ggcaccaaat gccatgctat gctttgaact tggagtttgc ctctaaatca |
| 40081 | gtgtttttct aagtgagttc cagggcaaac tgattcagag gaatgttcac agattttgca |
| 40141 | ataacaaaag ggctctgtga taccaaggga atttggaaaa cccagactta aactaaagag |
| 40201 | ggtattttgg ggtgtgtgtg tgtttctgtt ttgtctttta ctgtcttgga gcctttgata |
| 40261 | tgctactgtc ttctcagagc ttctgggtag gagtagggta gcctgggagt agacagagat |
| 40321 | ctactccatc agaccttaca atttcttttt tggcaggata gctcaaggaa ttataccctt |
| 40381 | tgagaaatag cctttccaga taacagttgc cattaataag ctttaggtgc caggcatttt |
| 40441 | aagtaacttg acatttattt ccaaaggttg gatttgatgc cattagagta tataataaga |
| 40501 | ggctgaaagc gctgaggaaa atacagaaac taataaaaag tggacaatta agagcaacaa |
| 40561 | aggtgagatg acatctttct tttccccctt aaattatttc ctttccctga tgagagcagt |
| 40621 | tagagggtct aaaattaaat ctatcctctt tagtatccag atgtgaatga acaaatgaca |
| 40681 | tgtacgtatc aaagaacaac tgagctattc ttataggcaa gcgggagtgg aagggaatga |
| 40741 | aataaaatca gcagcgctgc ctggaaacac aggatgtgat ttttttcccc accatgaaca |
| 40801 | gtgtctgcat tattttctat actttatttt tactgaaagg aacaaaataa gtgcaaattc |
| 40861 | aatgccagaa aactacccac catagaaggc agtctaagtc cataaacttt tggagctgtt |
| 40921 | aacttttact cagattcttc tggccagtgt atttcttggc aaagttccac aatcatccag |
| 40981 | aaaacaaaag tttcctggct cctctgttct cccagttttc ttcctagaca acatcaaagt |
| 41041 | ttgggctgag gtgaaaccca tccttaaaaa ttcatctcct tgatgtcttg cttaccaagg |
| 41101 | aacagtgtgt aggtcttttg gataatttga tatgaatggt tgaaagattt caaatctttg |
| 41161 | acaattaagt tgacagtgtt ttcttcgttt agaatggcat cataagtgat gctgtttcaa |
| 41221 | caaataatgc ttttgagcct gatgaggata ttgaagatct ggaggaactt gatatcccaa |
| 41281 | ccaaggaaat agagattcaa gtggattgga actctgagct tccagtcaaa gtgaacgttc |
| 41341 | ccaaagtgcc aatccatagc cttgtgcttg actgtggagc tatatctttc ctggacgttg |
| 41401 | ttggagtgag atcactgcgg gtggtaaggt tctggttttc tgaattatac atttggagct |
| 41461 | ttggcaatag taaaatgatg tgggttgtcc agtattgcaa cagggcaaat acatgggctt |
| 41521 | tgtaattttt ctaggtgaat gcttttgtaa aaaagtgtaa tattttaaag cataggctct |
| 41581 | ggagccagac tacctggggg agatactggc ttcaccactt actagcagta cgaccctggg |
| 41641 | caagttgctt aatctgtcta tatctcagtt tcttcatctg taatatggag gtaatgatgg |
| 41701 | tatctacctt cacaggttgt tacaaggatt aaataagcta atagatataa ggtgtttaga |
| 41761 | agagtgtctg gttcaggctg ggcatggtgg ctcacgcctg taatcccagc acttcgggag |
| 41821 | gctgaggcag gtggatcatg aggtcaggag ttcaagacca gcctggccaa tatggtgaaa |
| 41881 | ccccgtctct accaaaaata caaaaattag ctgggcatgg tggcgcacac ctgtagtccc |
| 41941 | agctcctagg aggctgtggc aggagaatcg cttgaacccg ggaggtggag gttgcagctg |
| 42001 | agattgtgcc actgtactcc agcctgggtg acagagtgag acttcatctc aaaaaaaaaa |
| 42061 | aaaaaaaaga atatctggtt caaagatact ccccagcaaa ttaattcaca tttattatgt |
| 42121 | tttatctttc tgagaatgta taacaagtgg tatatgaaaa gaaaaaaatg ggcaaaagtt |
| 42181 | tattaagtat tacatttcta tttgttatgt taacagcaac aggataagga ataccaggtg |
| 42241 | tatgttagga ctggaaaagc caggcattat taagaggtta gagtaggaag caggtcagac |
| 42301 | atctggaagg tcaaagcaag agttgaggag tatgcaggat agaaacatta atgatatcag |
| 42361 | aaaccagtta tgcaagctga agttcattaa ttctgtcaac aaatagatgt gaaatgccta |
| 42421 | atgtgtactg agcactctgc caggcacaag agactagtga tgaagtagac acagtttcta |
| 42481 | cctacgtggg acttagcagt ctggaggaga aggcaaacat taagtcatct tataaataac |
| 42541 | aattgtagta agtgctccaa agaagatgaa taggacatca cctgaagcat caagttcagt |
| 42601 | gaagcttcag gtaggtatca aaagggtcag gcagaaaagt aagcaggtca agacaccaac |
| 42661 | aatcagatgt aataatataa agctgactcc taactgaggt tccacttagc taaggcttct |
| 42721 | ttgctacctc tataagggga ggaaatgatt ccaggatgtg ggtactaggt aggtagggta |
| 42781 | gagaagtgat tgtgcttggc aaaagagtat gagaatatgc tgacaggttc tgttctagtt |
| 42841 | ctcttagcag attttgttat tagctcattt gaaatcactc ttgttctttg ttgtacattt |
| 42901 | cactctaagc attggctgag atccattgta gactatattg gccagagagt tcaatgaatt |
| 42961 | acttttgggg acagtcttaa catatttaat gccagaatat ttcccacaca acgaatattt |
| 43021 | actttcaaat attataatga cagttatgat agctaaagaa gactccaaac tttatacttg |
| 43081 | aacagaggtc ttgatttgtt ttcctccata attctcaaat tctcttttat tattgactat |
| 43141 | gggtcttgtg tcttgacttt ttaaaattaa atgtttattt tgacataatt gtaaattcac |
| 43201 | atgtagttgt aaggaataat atttagatcc tatatacccc ttacccagtt tctcccaatg |
| 43261 | agtaacatct tgtaaaactg tagcataaaa tcacagtagg acactgacat tcaaaataga |
| 43321 | ggccttgact tttaggtcaa tagtaacatt ttgaacccga taagcatagc cacacccata |
| 43381 | tctcttctcc aatcagcagg gcctatatta agaagcctcc tgtactctct tctttccaca |
| 43441 | aatgcttatt tagcacctcc acgctatcaa gtgcbgtgct attgagcgct ggatgttgcc |
| 43501 | atctcttgag atataatcct aattatacca ttactgtagt ttgaaaacct ccatggtttt |
| 43561 | gcaataataa cctttcctta aagtcctgat taaccatgaa agtaataatg tttctcctga |
| 43621 | gcaagtaact gaatgctact gaattatggg cagataaggt tgttaattgt tacaaactct |
| 43681 | ccttttttat ttttagattg tcaaagaatt ccaaagaatt gatgtgaatg tgtattttgc |
| 43741 | atcacttcaa ggtaaataca tatatctaca tatctacctg taagactttc ccgtaagccc |
| 43801 | tttctcctat ctgggactgt ggtcacatta tgtctgaagg cctttttttt ttttctttta |
| 43861 | aagatctcaa ttgtcattat ttgcagttct ggaatctggc actgcttcat tccataaaac |
| 43921 | agaataagtg ttccaaggaa ctaagcagga gttcagtatt atacacagaa aaggccaaag |
| 43981 | acagcaaaag caagcaacaa agagtatatt agtccattca aagttacttt cttgtaagtc |
| 44041 | agagacagtg agacagaaca ataggaaaat aatggattag ttaacatgag gtcatgtcag |
| 44101 | gatacttttt tgtatgagga ttattgcaga ggaagcttta ttattatgcc aactggaaat |
| 44161 | ttaaactgtc ctgttttagg aaatttgcta ttacctctct ctcctgattt cttcaagtat |
| 44221 | cagataacaa tttagtttag gtttgataac ttgaaacttt agcatgagtg actccatttt |
| 44281 | gatttttagt cttgtctgtt gtcgtctagt gcgggagctt agtctaaaac aatggccttt |
| 44341 | tatttttatt ttttatttta ctatgtgcct gtgccttgca tgaccccagg atgggcacag |
| 44401 | ctgcttggcc cctgagccac cgaaggctgc tctactcctt cgttctggct actaaaagct |
| 44461 | gcaaagctct gggagggcaa agctcaagaa gactaaaaca atggccttta ccatttttgt |
| 44521 | ttgatgattt tccccgtttt gatcaggctc tcacctaggt aagagtgaac aaaatgtagg |
| 44581 | agatcagtgc tactctgtta ccatcatttt gggtttctgg tctcaggagg tcatgtgtag |
| 44641 | cttatggtgc cctcctcatt atcatgtatg tctctgagtt tttgttgttt cagagagaga |
| 44701 | ccattcgatg tctgacaggt ggctttttgg aaacatttaa aactttgaga gggtataatg |
| 44761 | taccaggaag actgctatta tgactatcag ggagataata ccaagggttt atagtatgct |
| 44821 | ccttagccag gattctcatg aatcaaacca actaaaattg aatagcctga caaggagact |
| 44881 | acctgtttta accaagaagt cttctctgta gtacctgatg tatttatata tgtggaacaa |
| 44941 | gaagtgtcac ccaactgcac agatgcttcc ttgttgagtt agcaggtaat ctagcattcc |
| 45001 | atgactggtt aaattaaagc agaaagtgta agttacccaa agaagctact cattgtgaag |
| 45061 | ttttaactac agcactatcc tgccaagtga aagaggtagg cacaagtaag ggaaaattaa |
| 45121 | aagggataag catcttatga tagggagtct tgttctgaca gtcttggagc tgtctacagc |
| 45181 | atgaagttga caacttcttg ttttggtttg tagttttatt gtctctagtt gtggcatcca |
| 45241 | gcattctggc gaactctcta tgtggcccac agtttaagca tgagattcat ctcttgaaat |
| 45301 | ttacactgag ttgctcagct tcagcttaca gagcttcagg aactgagtag ttcttggtct |
| 45361 | tcattggagt gttgtagcca gatattagtg aaagctaaaa gaattaagaa tccagctcag |
| 45421 | tctacaggta gataataaaa actcataaat attgaacagg gctacagtct aagaacagtt |
| 45481 | ttactatgct tttcttttga accatatgtt tttctttcta tagtcacctc catttctatc |
| 45541 | aaagacgatc atggtagacc aatttgttta caaaataagt ttggtctcaa acttggcctg |
| 45601 | attgattatt tacacagtac agcaagaata actacatagg tgactccttt caaatttgct |
| 45661 | ttgccaagcc tggcgaggta ttgcttgcct gtgagcccag ctacttggga ggctgaggtg |
| 45721 | agaggattgc ttgagcccag gaattcaagg ctgcagtgca ctatgattgt gcctgtgaat |
| 45781 | agccactgca ctatagcctg gacaacacag tgagaccatg tctccaaaaa ataattgctt |
| 45841 | tgatagaaat tttgacaagg aatctcagat tggacttttt aaaacgtctt gatgctatga |
| 45901 | agtcaaacca aggcagacat taggctttgc ctgatgtatc taatatcttg aagttactgg |
| 45961 | gcctcccagg aaggaacgac tttttattca ctcattgtaa ggctagcagc ccttgaagcc |
| 46021 | aggaattctg tgcacatttt caaatatgat attctattca aagccttgat aatataacca |
| 46081 | atgttttcca attgtattct atttaaaaga acagattcta ttgaactttc atgtaaataa |
| 46141 | tcatattgcc ataaaaataa gaatactcac aaagagtttc caaattctgg aaggatcagg |
| 46201 | tagagaggaa aagcaaatgt ttcaattttt gtttatgaaa gtatgcttaa caaggctggg |
| 46261 | tgcggtggct cacatctgta atcccagcac tttgggaagc caaggcggac aattgctttg |
| 46321 | agctcagagt ttgagaccag cctggcaaca tggcaaaacg ccgttactac aaaaaataca |
| 46381 | aaaaattagc tgggcatgga gcctgaggct gagaatcact tgagctgggg aagtggaggt |
| 46441 | agcagtgagc ccagatggtg ccactgcact ccaacctggg tgacagagtg agaccctgtc |
| 46501 | tcaaaaaata aaaaaaaagt atgcttaacc aagtggctgt aaactgcaga tagctttaaa |
| 46561 | gaaaaatttt ctttagatct ggaaaacaaa tattaaaaga accagcaatg tttcaaataa |
| 46621 | aaaagccata aaacctgtaa ttcttctcca tcagttcatt cagtctcatg taattaattc |
| 46681 | ttgctctgtt tgatcttggc tggtagttta attccaacga atggtatgaa ttcaaagtta |
| 46741 | ttagaaacct gtatttgtca gagttctttt cattcttccc atataactct ttgaagtcac |
| 46801 | agcactttag aattataatg gcttacaaag agctttcaga aaaagtatca gaacaaaaca |
| 46861 | attaactgtg gacaacaaga cttaaagtgg ctatatttaa agatctgatg tgagttaccc |
| 46921 | aattgacaag gatatttgga tatttctgtg gcacacaaca atttaaaata accaaaatta |
| 46981 | tgactggtag catttatacc aagacctatc acatttctag gaatgttata taattttgga |
| 47041 | acatattaat aacatatcta taaaaatata gcacaaagaa agttaaacat catttcttat |
| 47101 | tttaacagtg cttcccatat aatttaacct atcagataag gccatttggt ttaacatctc |
| 47161 | tcttttacag attctttaag aaattccagg gtcctctgga acatcccaaa gttagttcaa |
| 47221 | ggtcaaaaag acttaatttt gatttttgag aagtttgtca aataccaaag gtttaaaaca |
| 47281 | tttgatcaaa atcggatcat aggtcactat gaaataaaac caaagtgaaa aaagagttca |
| 47341 | aaggcaaaaa gcacaagaag agttatattg atgaaacatg aaatctctgt tttctaggcc |
| 47401 | agttacctgg aagagaaaat cctctcacaa ttttctatta agagtaaacc aatcctctga |
| 47461 | gaaaactcta ttgttccaac acataggccc acactttagc cttccatcag tgtactttaa |
| 47521 | tattaatgct caatttttag aaaaacttat aaataattcc cttctacttt tagccaactc |
| 47581 | aatcacataa aatttttcat gatatttatc ttctacaaac cttctacaac ttgcttaaac |
| 47641 | cttcatttgg tcctatactt ccttttttaa aattggcatt gtaccttagg acaaagattt |
| 47701 | acttttcttt tctccttatc attttgacca tataaggtta tctcctatac aaaagaaaaa |
| 47761 | attactctct tttcaatttt ctttatctct tcatacttgt aaatttcttc tcacatcttt |
| 47821 | cctacctagt ggttccttcc tgccttgttt tgatttcctt cataagtcca tatttagaaa |
| 47881 | caacctttaa ataacctctg attgccaagc tagagttaag ttttaaataa ataaataggc |
| 47941 | cggtcatggc ggctcacatc tgtaatccca gcactttggg aggcaaaggt cagaggatca |
| 48001 | cttcaggcca ggagtttgag accagcctga gcaacatggt gagaccccgt ctctattatt |
| 48061 | ttttttttaa aaaacaaaaa gcataaaaac tctgagaaca ttttgaaccc agaaagatat |
| 48121 | tacttccaat ttgtgccaca gagctggtaa tgtatggaaa tgtgtatctt gacagtgggt |
| 48181 | gggggtgggg tgaatattga caatgggggg atgttgttat gaggagagca aagctggaga |
| 48241 | ttacttagat tccttagaac aggaggactc tcaagggtgt gagtctctgt gtgtttcttt |
| 48301 | atgaatgtat gtgtgtagga aagtgctaag gcttaggttg aattctttag cagcagagcc |
| 48361 | caagatgggg attcttgcac aagcgattta ttgagaatac atctgaggaa atttatgaag |
| 48421 | cagtgagggg agcaggatag ggaaggggaa gaagctgatc aaagacatgg tttctgaagt |
| 48481 | ccagcgtaga tccctgattt cacagggagc accaccacag gaagagtacc agaaggttat |
| 48541 | gcctccttga ggcaagagga cctgctttct cccccagtaa tgagtcagtc agtggctgca |
| 48601 | ggccagccat gtgtggggat gaaacctccc agttctcttt atttacttat ttatttgaga |
| 48661 | cagggtcttg ctctgtcacc caggctggag tgcagtggtg caactgtggc tcactgcagc |
| 48721 | ctcaaactcc tgggctcaag tgatcctccc atctcagcct cctgagtagc tgagactata |
| 48781 | ggtgcacaac cacacctggc taatttttgt atttttttat aaagatgggg tttcaccata |
| 48841 | ttgcccagaa gttctgggtt caaagtgatc tgccctcctc ggcctctcaa agtgctggaa |
| 48901 | ttacagaccc agtcctcttt agatgacaca gctcccaacg ggcaagggaa agtctccaga |
| 48961 | gaagggcaca gctgtgaaac attggcagcc tggcccacag cagcaggagg atggatacac |
| 49021 | tggcttggcc aaagggacgt gatcgtccac aaggttgact acgaccagtt atgggataac |
| 49081 | cattctatat actactggaa aagaaactgt catttcaaat ctgggtcaca ttttggataa |
| 49141 | gagaaaaata aataaataaa aggaggagct acaaaaactt agtataggtt gatgctttaa |
| 49201 | aatttctttt cttagcbggg catggtaggg tgtgccctgt agtcctagct aattgggagg |
| 49261 | gtgaggtggg gggatcactt gaacttggga cgcggaggtt gcagtgagca atgatgccac |
| 49321 | tgcactccag cctgggcaat agaatgagac tctgtctcaa aaacaaacaa aaatttcttt |
| 49381 | tcctaggaac taacaaaaca ttgtgtcttt cttttgaaga ttatgtgata gaaaagctgg |
| 49441 | agcaatgcgg gttctttgac gacaacatta gaaaggacac attctttttg acggtccatg |
| 49501 | atgctatact ctatctacag aaccaagtga aatctcaaga gggtcaaggt tccattttag |
| 49561 | aaacggtaaa tattcaacct ttctacagat gtatcttttc taaactatca tgatttctat |
| 49621 | aaatggcaaa cattacacaa gtctagtcta gcbgttgaat tttaagctac ctatataact |
| 49681 | tcatggagcc tcagtttttt catcagtaaa atggaagtaa aaacattaac cttgctaggt |
| 49741 | agatatgaag actaaataag atagtttata ggaaattacc tggtagtacc cagtactgaa |
| 49801 | tagttctaca atgtgtaggt ttattaataa aagtgggcat tagctataat gccttttaag |
| 49861 | aatattgaat cttggatctt ttgtgatctg ggatttgtgt acataaattc cacttaaatt |
| 49921 | ctcagcaatc tggaaaacct tgaattataa atgtctttaa acaggatcca ccaggccata |
| 49981 | agtgatcttt gaaaaagaaa tttaaaaatc aagccacaaa gaagcccagg gttaattttt |
| 50041 | ccctacaaaa tagaataggc cctgatggga ggcctcatgg cacaacagta gcgcatctgg |
| 50101 | ctccagaata ggccctgatt tcccatgggt attattttgt taatttttct gtcaaatacc |
| 50161 | cagaagaggt gagcattctg gtctggttca ttgggcttgg cctaatggtg ctcctggtgg |
| 50221 | tacaagaatc tcatttctca tagtgaattt aggaaactaa agcaaatacc tatcaagata |
| 50281 | taataacagt aatgattcca gtgacatcgt ggatatttta aattgcttcc catttttcta |
| 50341 | aaagtagaat aagtagatcc ttattgtaga ttggcagttg attgaagaaa actaacttag |
| 50401 | gaaatgatat tatattattc tttttaggca ctggtagtgg agagattgtt ctatttgatg |
| 50461 | ttccttggta aaatactagt cctaactacc aagcbgtgga tcttaaatat aaaaaaggaa |
| 50521 | aaaaaaaaaa gagtaaagct acaaatctaa agaaaaaaaa actgtttatc attgaaaatt |
| 50581 | cataaacttt ttctatccaa cttaaaattc tctaacccat aggtgataag aaagttggat |
| 50641 | catatgaagt atcctttaag agatccacat taaaagtaaa acagaaccaa ggtatcaagt |
| 50701 | tctttctcaa catgaaagca gttattttat ttgtttatac ccattcttac taagatttta |
| 50761 | ggctatgaat gtcataaaaa ccactaacca agagtgtatc tactaggtta gactcactct |
| 50821 | tgtttgcaat cagagaggta ttgtgagtgg ctgggatgga tttttttgga ccttaaacaa |
| 50881 | atagactaag cataacggaa tgcttgtatt acatacttac tggtccacta aaagtgggtt |
| 50941 | ggacattcct ggtggcctgt gagatcaaga ggcttatatt tctgtgtctt ctcagagtct |
| 51001 | agcacaaagc tttatatgtg ataagtaggt gaatgatgat aaactccttc aagagggagt |
| 51061 | ccctctgtat caaagatatt gtgactgcaa tgacacaacc ttcttcctat ccctttattt |
| 51121 | taccatcaca ggactatctc aggacacaac ttgtagttag acttatcctc tacctttccc |
| 51181 | attatgtcat accatttgca cagggactta accctctaat tcattctcat actagctaag |
| 51241 | agaattgggc tatttgtgag ttgaaaagta gctaagtagc atttcaaaat gttattttag |
| 51301 | cctggatata tatttggagt tgctttgaaa atgtcctttt ccatgcaaaa cacaaagcca |
| 51361 | aaattgtcgt tggtttcctc tgtgtagaag attaaattac atgccacctc taaacagtag |
| 51421 | agcttttctg aataaccaac ttggtccata gacattggtt tccatctcca atagaattaa |
| 51481 | tttccaccca attccatttg tggctgtttt ttgtcatcag tgacaagctc ttcactgtgc |
| 51541 | attcattgca cactcaacgc tgtgctaagt gctcttagct tagccattga gagatgcact |
| 51601 | attgactgct gaatcattta ggcagagggg gtgacttgtt aagaggcata cactcaagag |
| 51661 | gttggggaag agagctgaaa aggagtttac acaatggaga actataccag ttcacctttc |
| 51721 | aatgtgcaaa aaaatgatat acaaaaaatt ttagttggga aatataaaag aacaatacag |
| 51781 | ctgaagagga ttctgaagta tgtaaagaca gatgagaagc accaggaaag cttcaaatca |
| 51841 | ttttcagtgg agcatcaggt gggttgatgc tattctattt ctaccctgtg ttctcttttt |
| 51901 | caagatcact ctcattcagg attgtaaaga tacccttgaa ttaatagaaa cagagctgac |
| 51961 | ggaagaagaa cttgatgtcc aggatgaggt atgatcattt tcttctgaag aaaatatttg |
| 52021 | aattacattt tgaataatta gagtaataca aatagtgaat atatctgatt aagaactgtc |
| 52081 | agggaacata attcccccaa atgcagaaaa gatggcttca tagcagggaa aaagagaaaa |
| 52141 | taagaattct cccttgaaga cattaagtac ttggggatct tttgtcccag gcatttgggg |
| 52201 | atgatcagca actggcaaga gccaacacac tgctcctgat ttgataccta cacctctgca |
| 52261 | tactgctctt ctagagatgt aaggccatgg ggtaggaaaa aaatgaatag aggaaacttc |
| 52321 | taagctagga actttataag cctcaggaat agtatgtgag gaacagaaac cctatgacct |
| 52381 | tccttcatat gactgataaa ggctttaaaa acacactctc cccaccctag actgattctg |
| 52441 | tgtatttcag atgctcttgt gacatcagac tattcctagg aaacttgtct gaacttgtag |
| 52501 | catctgagta aattttgcag cttcgccact ggataagagg tgaacactga aggaagatca |
| 52561 | cagaattgta aaaagttgaa agatttctta gaatcaagta gtctaacatt ctagcccatg |
| 52621 | cagaaatcct tcctacacca tccttgatga atgttcattc agcttttatg tgaacatttc |
| 52681 | cagacattgg ccactagcgg cttctcaagg gagtttgtta catggttgga agtctctaaa |
| 52741 | tgttacttgt gcttacagaa ctcaatttgg cctttctgta gtaaccacct agtgaactga |
| 52801 | gatctgcctt ccttagcaac acagaccttc ccactgaaca gcccttcaaa tatttgagaa |
| 52861 | tagttctcat gtctccagca gactctcttc cagttgagac tcttctagtt ccttctattc |
| 52921 | cttacaaaca agcagtcagt gcttctctgg tcacgatggg gacacaaaac cctaaatgcg |
| 52981 | gccaggccag catggagatt attcaaccat gacctacctt gatctcatca agatattcct |
| 53041 | attactacag cttaaaaatg tgtttccttt cataatagca acatcagaat tttagcttct |
| 53101 | attgagcagg ggccaactaa agactggggc attttcatac aagctatggt ctagtagagt |
| 53161 | tccctagtta tatttattta attgagcttt gaccctaata cagaactaca cctatttctg |
| 53221 | ctggatttca tcttgttggt tcttgtttac tgacataatt ttgtattatt attagtatta |
| 53281 | ttattattat tattatttgt gactgagtct tactctgtca cctggactgg agtgcagtgg |
| 53341 | tacaatctca gctcactgca atccctccct cccaggttca agagattctc acgtgtgcct |
| 53401 | cagcttccca agtagttggg attacaggcg ctcgccacca cgtccagata attttttttt |
| 53461 | tttgtattct tagtagagac agggttttgc catgttgtcc aggctggtct tgaactcctg |
| 53521 | acctcaagta atccacctgc cttgccctcc cagattgctg ggattacagg catgagccac |
| 53581 | cacattggcc agttttgtgt tttgaatcta acatccagga tattgtctac cccagtaccc |
| 53641 | gttacctggt gtcataatca aatctgataa gcctgccttc tctgcctttt tctaggtctt |
| 53701 | gaaaaaatgt tgcaaagaaa acattcaacc ccctatagtg aaatcaggca gtaaggatga |
| 53761 | caggcagaga tttctgtgga ggaaatacat tgctagagtg aaaatcacag tacctgcatc |
| 53821 | ttggcccacc agcttagtga gcccaggaaa gtcattatcg acctgagaag tccttttagc |
| 53881 | tccagtagtt tatgactcta tggatatagg gtgccttagt ttgagtaaaa actcatatgt |
| 53941 | caacattaaa acttaagact gctatattat aggatattta ttggttgcca cgtaaaataa |
| 54001 | tcattcaggg agggtttcta tagatggtaa aacaatatag cacaatagtt tcaagggcat |
| 54061 | ggactttaga acaagacaga cctgggtgct agtcctcatt ctgctactta ctggctgtgc |
| 54121 | accccagggc aaattactta tcctgtcttc atattagtat cttcatgtaa agtagtaata |
| 54181 | ataccacaga gttgtgaaaa ttaaaggata aatgtaaagt aacaagagca gtgccttgta |
| 54241 | catagtaagt gctcaataaa tagtaatcat tgctcttaaa taaatccaat taaagtgtga |
| 54301 | tgaatacagg ccaggctcag tgactcaagc ctgtaatccc agcactttgg gaggctgagg |
| 54361 | cagggggatc acttgaggtc aggagtttga gaccagcctg actaacatgg taaccccccg |
| 54421 | accatctcta ctaaaaaaaa aaaaaaaaaa attagcbggg tgtggtggca ggcacctgta |
| 54481 | atcccagcta ctcgggaggc tgaggcagga gaattgcttg aacctgggag gcagaggttg |
| 54541 | cagtgagctg agatcacgcc acagcactcc agcctgggca acagtgagtg agattcagtc |
| 54601 | tccaaaaaaa aaaaaaagta taatgaatac gaaatgaagt ttttacccta tttctattgt |
| 54661 | gatgatatac acctaagatg agtagcagta agcaatcaat actataaaaa catatttata |
| 54721 | aaaaagataa tgcagactta aggagaattc agttgtatca acactttgtt ttccccttgc |
| 54781 | ttccacaggc tatgcgtaca cttgcatcct gaaagtgggt tcgggaggtc tctatgagca |
| 54841 | aggaatacaa gacaaaactt cctcaatgca ttgactattt cttcagactc aaaacactca |
| 54901 | ttcttttttc tattaagcca ttgaaagaga agcactaaga ctgcttctag gctttattta |
| 54961 | taaaataaac accttatccc taacatgggc aaaatggcta gaattattca gacgatttgg |
| 55021 | cagcgtccag ggtaagctgg tgttataata cgctgctgat ctacatcaca gatttgctaa |
| 55081 | taatgttcac gtgggccctg gcatatctct gttcagttag agtgagtgct gacccaacag |
| 55141 | cctctgtggt caagcgagtc acgaatgatt aatcataaag aaaaatcagt ttttgactga |
| 55201 | cctggatatc catgagctgc actgatcacc atgtaaggtc acatttagta aatgctgaaa |
| 55261 | taaaatgatt aatgcattta tcaataaaag cctttgaaaa tactttggat aataaattgg |
| 55321 | agttttaaaa atgcaaattt gcttagtatc taataatgaa gtgttattac atatagccgg |
| 55381 | aattgaggat ctctttgatc ctggaaatgg tttacctaaa agctacagaa ccaggccaat |
| 55441 | atattttgaa atattgatgc agacaaatga aataataaag agattttcat ggtttataaa |
| 55501 | aatctttttt gatatgataa taatcatgat cacaactgag atcaaaaaaa tatatgacag |
| 55561 | attattttgt ttaaaaatgc agttttaatt atcttagtct atagaaatga tcattgcatg |
| 55621 | gaggcatgta taggtatgat ctgtgtaaaa tctgacataa aaacagtgct attctgagtg |
| 55681 | aaaatttttt tgatgtgctt acataaccat ggtgattaaa atgagtttat attttttctc |
| 55741 | aaaaatttta gcagtgtgta aagtaagtaa tctttaactg aactctgacc acttaaaaaa |
| 55801 | aaatctaaaa attgaactac ctatagtagt ctgtgtttaa agtgaatttt taaagacaaa |
| 55861 | gcattctaaa tgaactcaat ataaaaacat tcatttggaa tgtacatact gaaaaataca |
| 55921 | ggtttttttg accaaaagtt tttatatctt ttctttttat ttattttttt cctaagtgcc |
| 55981 | aacaattttc tagatattat atacaacaca ggctttgatc ttggggactt ttcccatata |
| 56041 | tttcacactg gagtgaatga agttgtactt catttctaga gaaaagttat acccaggtcc |
| 56101 | ccaattgaga atgtcttgct tgattgaaaa cgacatcatc ccttggtata ctccagggat |
| 56161 | tggtttcagg acccctgcat ttaccaaaat ttgtgcacac tcaagtcctg cagtcacccc |
| 56221 | tgcctaaaga tagaatggct tctctgtttt tcttctgaaa tacaaccaga aacaatgtgt |
| 56281 | ctatttctga aagaatagga ttaatgatca tacaaatggg ttaatcctga attctggttg |
| 56341 | taaatctggt tacagcataa ctaggattat aatgctgcct cattttcaca gcactacttg |
| 56401 | cttatattga caacaaatca tctcgctaaa gagtgaatgt aggccaggcg cggtggctca |
| 56461 | tgcctgtaat cccagcactt tgggaggccg aggcgggtgg atcacgaggt caggagatcg |
| 56521 | agaccatcct ggctaacatg gtaaaacccc gtctctacta aaaatagaaa aaaagaaatt |
| 56581 | agcctagcgt ggtggctggc gggcgcctgt agtcccagct atttgggagg ctaaggcagg |
| 56641 | agaatggcgt gaacccggga ggcggagctt gcagtgagcc gaggtcgtgc cactgcactc |
| 56701 | cagcctgggc gacagagcaa gactccgtct caaaaaaaaa aaaaaaaaaa aaaaaagagt |
| 56761 | gaatgtaata gtcttgcaga aaatgaatga atacctttgt tcaataaagg aaatatgcac |
| 56821 | tgctcacttt tttgaaggaa atgccaaagt tacgttttac aacaaggcta gagtttgtaa |
| 56881 | attctgggtt catttgtgat gacataagtc agcaaactgc gggaatactg tctcttctat |
| 56941 | gtattttgtg aatagtaagc ataattttag ttttgtatta tcaatgaaaa tttcacttga |
| 57001 | aattaaagct gccttttgtt atatttttaa cctataggat aagattccag tattgtatat |
| 57061 | gagttttaac aaattaaaaa atcaaatcat gtacatttga aaatatttgc acacatttaa |
| 57121 | aaataaatgt aaagttgtct tttaaactac tcggatgtgt cctttctgaa caaaa |

### Otoferlin

[0124] To date, several hundred mutations in the human OTOF gene have been identified to cause profound prelingual deafness DFNB9. Such mutations are the cause of deafness in 2-8% of people that are born with an autosomal, recessively inherited, non-syndromic deafness in different populations (Rodriguez-Ballesteros et al. (2008) Hum. Mutat. 29 823-831; Choi et al. (2009) Clinical Genetics 75 237-243; Duman et al. (2011) Genet Test Mol Biomarkers 15 29-33; Varga et al. (2006) J Med Genet 43 576-581; Iwasa et al. (2013) BMC Med. Genet. 14 95). For example, two substitutions in exon 15 at positions 490 and 515 in the conserved C2C domain of otoferlin cause DFNB9 (Mirqhomizadeh et al. (2002) Neurobiol. Dis. 10(2): 157-164). Migliosi et al. found a novel mutation Q829X in OTOF in Spanish patients with prelingual non-syndromic hearing loss (Migliosi et al. (2002) J. Med. Genet. 39(7): 502-506).

[0125] Additional exemplary mutations in a otoferlin gene detected in subjects having hearing loss and methods of sequencing a nucleic acid encoding otoferlin are described in, e.g., Rodriguez-Ballesteros et al. (2003) Hum Mutat. 22: 451-456; Wang et al. (2010) BMC Med Genet. 11:79; Yildirim-Baylan et al. (2014) Int. J. Pediatr. Otorhinolaryngol 78: 950-953; Choi et al. (2009) Clin. Genet. 75(3): 237-243; and Marlin et al. (2010) Biochem Biophys Res Commun 394: 737-742.

[0126] Otoacoustic emissions from DFNB9 patients are normal, at least for the first decade of life, indicating morphological integrity of the inner ear and proper function of outer hair cells. Apart from the lack of synaptic transmission and the subsequent loss of synapses, the morphology and physiology of the inner ear remains preserved in DFNB9, at least during the first decade in life in humans.

[0127] Studies in mouse models revealed that synapses are structurally normal, and IHCs preserve normal synapse numbers in mice within the first postnatal week. Between P6 and P15, about half of the synapses get lost (Roux et al. (2006) Cell 127 277-289). Animal models allowed studying the effect of mutations in otoferlin on synaptic transmission by recording the change in plasma membrane capacitance after vesicle fusion and the activity in the auditory nerve. In otoferlin knock-out (Otof−/−) mice, almost no exocytosis could be triggered in IHCs by depolarization induced Ca2+ influx through voltage gated Ca2+ channels (Roux et al. (2006) Cell 127 277-289). In profoundly hearing impaired pachanga (Otof^{Pga/Pga}) mice with a random point mutation in the C2F domain, short (<10 ms) depolarizations of the IHCs elicited vesicle fusion of similar size as in wild type mice, however sustained stimulations uncovered a strong deficiency in replenishing vesicles to the readily releasable pool (Pangrsic et al. (2010) Nat. Neurosci. 13 869-876). The p.Ile515Thr mutation, found in human patients with only mildly elevated hearing thresholds but a severe reduction in speech understanding and a temperature-dependent deafening (Varga et al. (2006) J Med Genet 43 576-581), uncovered an intermediate phenotype when studied in a mouse model (Strenzke et al. (2016) EMBO J. 35:2519-2535). These OtofI515T/I515T mice showed a moderate elevation of hearing thresholds when assessed by ABR with a reduction in wave I amplitude, but normal auditory thresholds in behavioral tests and recordings of single auditory nerve units. Exocytosis of the RRP is again intact, but sustained exocytosis is reduced, although not as severe as in OtofPga/Pga. While in wild type mice at room temperature, during a sustained stimulus 750 vesicles can fuse per second at each active zone, this rate drops to 350 vesicles/s/active zone in OtofI515T/I515T mice and to 200 vesicles/s/active zone in OtofPga/Pga IHCs (Pangrsic et al. (2010) Nat. Neurosci. 13 869-876; Strenzke et al. (2016) EMBO J. 35 2519-2535). This correlated with lower otoferlin protein levels at the plasma membrane of IHCs, indicating that the amount of otoferlin scales with exocytosis and hearing (Strenzke et al. (2016) EMBO J. 35 2519-2535).

[0128] Methods of detecting mutations in a gene are well-known in the art. Non-limiting examples of such techniques include: real-time polymerase chain reaction (RT-PCR), PCR, sequencing, Southern blotting, and Northern blotting.

[0129] The OTOF gene encodes otoferlin, a protein that is involved in synaptic vesicle exocytosis in cochlear hair cells (see, e.g., Johnson and Chapman (2010) J. Cell Biol. 191(1):187-198; and Heidrych et al. (2008) Hum. Mol. Genet. 17:3814-3821).

[0130] The human OTOF gene is located on chromosome 2p23.3. It contains 48 exons encompassing ˜132 kilobases (kb) (NCBI Accession No. NG009937.1). The mRNA encoding the long-form of otoferlin expressed in the brain includes 48 exons (Yasunaga et al., Am. J. Hum. Genet. 67:591-600, 2000). Forward and reverse primers that can be used to amplify each of the 48 exons in the OTOF gene are described in Table 2 of Yasunaga et al., Am. J. Hum. Genet. 67:591-600, 2000. In some examples, the full-length OTOF protein is a full-length wildtype OTOF protein. The full-length wildtype OTOF protein expressed from the human OTOF gene is 1997 residues in length.

[0131] An exemplary human wildtype otoferlin protein is or includes the sequence of any one of SEQ ID NOs: 8-12. Isoform e of human otoferlin protein (SEQ ID NO: 12) is encoded by an mRNA that includes exon 48 and does not include exon 47 of the otoferlin gene (Yasunaga et al., Am. J. Hum. Genet. 67:591-600, 2000). In some embodiments, the active otoferlin protein has the sequence of SEQ ID NO: 12, but is missing the 20 amino acids including the RXR motif identified in Strenzke et al., EMBO J. 35(23):2499-2615, 2016). Non-limiting examples of nucleic acids encoding a wildtype otoferlin protein are or include any one of SEQ ID NO: 13-17. As can be appreciated in the art, at least some or all of the codons in SEQ ID NO: 13-17 can be codon-optimized to allow for optimal expression in a non-human mammal or in a human. Orthologs of human otoferlin proteins are known in the art.

Human canonical (long) isoform sequence (otoferlin protein) (also
called otoferlin isoform a) (NCBI Accession No. AAD26117.1)
(SEQ ID NO: 8)
[sequence omitted]
Human Isoform 2 (short 1) (otoferlin protein) (also called otoferlin
isoform d) (NCBI Accession No. NP_919304.1)
(SEQ ID NO: 9)
MIKTEKSYPERRLRGVLEELSCGCCRFLSLADKDQGHSSRTRLDRERLKSCMRELENMGQQARMLRAQVKR
HTVRDKLRLCQNFLQKLRFLADEPQHSIPDIFIWMMSNNKRVAYARVPSKDLLFSIVEEETGKDCAKVKTL
FLKLPGKRGFGSAGWTVQAKVELYLWLGLSKQRKEFLCGLPCGFQEVKAAQGLGLHAFPPVSLVYTKKQAF
QLRAHMYQARSLFAADSSGLSDPFARVFFINQSQCTEVLNETLCPTWDQMLVFDNLELYGEAHELRDDPPI
IVIEIYDQDSMGKADFMGRTFAKPLVKMADEAYCPPRFPPQLEYYQIYRGNATAGDLLAAFELLQIGPAGK
ADLPPINGPVDVDRGPIMPVPMGIRPVLSKYRVEVLFWGLRDLKRVNLAQVDRPRVDIECAGKGVQSSLIH
NYKKNPNFNTLVKWFEVDLPENELLHPPLNIRVVDCRAFGRYTLVGSHAVSSLRRFIYRPPDRSAPSWNTT
GEVVVTMEPEVPIKKLETMVKLDATSEAVVKVDVAEEEKEKKKKKKGTAEEPEEEEPDESMLDWWSKYFAS
IDTMKEQLRQQEPSGIDLEEKEEVDNTEGLKGSMKGKEKARAAKEEKKKKTQSSGSGQGSEAPEKKKPKID
ELKVYPKELESEFDNFEDWLHTFNLLRGKTGDDEDGSTEEERIVGRFKGSLCVYKVPLPEDVSREAGYDST
YGMFQGIPSNDPINVLVRVYVVRATDLHPADINGKADPYIAIRLGKTDIRDKENYISKQLNPVFGKSFDIE
ASFPMESMLTVAVYDWDLVGTDDLIGETKIDLENRFYSKHRATCGIAQTYSTHGYNIWRDPMKPSQILTRL
CKDGKVDGPHFGPPGRVKVANRVFTGPSEIEDENGQRKPTDEHVALLALRHWEDIPRAGCRLVPEHVETRP
LLNPDKPGIEQGRLELWVDMFPMDMPAPGTPLDISPRKPKKYELRVIIWNTDEVVLEDDDFFTGEKSSDIF
VRGWLKGQQEDKQDTDVHYHSLTGEGNFNWRYLFPFDYLAAEEKIVISKKESMFSWDETEYKIPARLTLQI
WDADHFSADDFLGAIELDLNRFPRGAKTAKQCTMEMATGEVDVPLVSIFKQKRVKGWWPLLARNENDEFEL
TGKVEAELHLLTAEEAEKNPVGLARNEPDPLEKPNRPDTAFVWFLNPLKSIKYLICTRYKWLIIKIVLALL
GLLMLGLFLYSLPGYMVKKLLGA
Human Isoform 3 (short 2) (otoferlin protein) (also called otoferlin
isoform c) (NCBI Accession No. NP_919303.1)
(SEQ ID NO: 10)
MMTDTQDGPSESSQIMRSLTPLINREEAFGEAGEAGLWPSITHTPDSQEEGLNDIQEMIKTEKSYPERRLR
GVLEELSCGCCRFLSLADKDQGHSSRTRLDRERLKSCMRELENMGQQARMLRAQVKRHTVRDKLRLCQNFL
QKLRFLADEPQHSIPDIFIWMMSNNKRVAYARVPSKDLLFSIVEEETGKDCAKVKTLFLKLPGKRGFGSAG
WTVQAKVELYLWLGLSKQRKEFLCGLPCGFQEVKAAQGLGLHAFPPVSLVYTKKQAFQLRAHMYQARSLFA
ADSSGLSDPFARVFFINQSQCTEVLNETLCPTWDQMLVETNLELYGEAHELRDDPPIIVIEIYDQDSMGKA
DFMGRTFAKPLVKMADEAYCPPRFPPQLEYYQIYRGNATAGDLLAAFELLQIGPAGKADLPPINGPVDVDR
GPIMPVPMGIRPVLSKYRVEVLFWGLRDLKRVNLAQVDRPRVDIECAGKGVQSSLIHNYKKNPNFNTLVKW
FEVDLPENELLHPPLNIRVVDCRAFGRYTLVGSHAVSSLRRFIYRPPDRSAPSWNTTVALLARCRVLCNGG
SSSHSTGEVVVTMEPEVPIKKLETMVKLDATSEAVVKVDVAEEEKEKKKKKKGTAEEPEEEEPDESMLDWW
SKYFASIDTMKEQLRQQEPSGIDLEEKEEVDNTEGLKGSMKGKEKARAAKEEKKKKTQSSGSGQGSEAPEK
KKPKIDELKVYPKELESEFDNFEDWLHTFNLLRGKTGDDEDGSTEEERIVGRFKGSLCVYKVPLPEDVSRE
AGYDSTYGMFQGIPSNDPINVLVRVYVVRATDLHPADINGKADPYIAIRLGKTDIRDKENYISKQLNPVFG
KSFDIEASFPMESMLTVAVYDWDLVGTDDLIGETKIDLENRFYSKHRATCGIAQTYSTHGYNIWRDPMKPS
QILTRLCKDGKVDGPHFGPPGRVKVANRVFTGPSEIEDENGQRKPTDEHVALLALRHWEDIPRAGCRLVPE
HVETRPLLNPDKPGIEQGRLELWVDMFPMDMPAPGTPLDISPRKPKKYELRVIIWNTDEVVLEDDDFFTGE
KSSDIFVRGWLKGQQEDKQDTDVHYHSLTGEGNFNWRYLFPFDYLAAEEKIVISKKESMFSWDETEYKIPA
RLTLQIWDADHFSADDFLGAIELDLNRFPRGAKTAKQCTMEMATGEVDVPLVSIFKQKRVKGWWPLLARNE
NDEFELTGKVEAELHLLTAEEAEKNPVGLARNEPDPLEKPNRPDTSFIWFLNPLKSARYFLWHTYRWLLLK
LLLLLLLLLLLALFLYSVPGYLVKKILGA
Human Isoform 4 (short 3) (otoferlin protein) (also called otoferlin
isoform b) (NCBI Accession No. NP_004793.2)
(SEQ ID NO: 11)
MIKTEKSYPERRLRGVLEELSCGCCRFLSLADKDQGHSSRTRLDRERLKSCMRELENMGQQARMLRAQVKR
HTVRDKLRLCQNFLQKLRFLADEPQHSIPDIFIWMMSNNKRVAYARVPSKDLLFSIVEEETGKDCAKVKTL
FLKLPGKRGFGSAGWTVQAKVELYLWLGLSKQRKEFLCGLPCGFQEVKAAQGLGLHAFPPVSLVYTKKQAF
QLRAHMYQARSLFAADSSGLSDPFARVFFINQSQCTEVLNETLCPTWDQMLVFDNLELYGEAHELRDDPPI
IVIEIYDQDSMGKADFMGRTFAKPLVKMADEAYCPPRFPPQLEYYQIYRGNATAGDLLAAFELLQIGPAGK
ADLPPINGPVDVDRGPIMPVPMGIRPVLSKYRVEVLFWGLRDLKRVNLAQVDRPRVDIECAGKGVQSSLIH
NYKKNPNFNTLVKWFEVDLPENELLHPPLNIRVVDCRAFGRYTLVGSHAVSSLRRFIYRPPDRSAPSWNTT
GEVVVTMEPEVPIKKLETMVKLDATSEAVVKVDVAEEEKEKKKKKKGTAEEPEEEEPDESMLDWWSKYFAS
IDTMKEQLRQQEPSGIDLEEKEEVDNTEGLKGSMKGKEKARAAKEEKKKKTQSSGSGQGSEAPEKKKPKID
ELKVYPKELESEFDNFEDWLHTFNLLRGKTGDDEDGSTEEERIVGRFKGSLCVYKVPLPEDVSREAGYDST
YGMFQGIPSNDPINVLVRVYVVRATDLHPADINGKADPYIAIRLGKTDIRDKENYISKQLNPVFGKSFDIE
ASFPMESMLTVAVYDWDLVGTDDLIGETKIDLENRFYSKHRATCGIAQTYSTHGYNIWRDPMKPSQILTRL
CKDGKVDGPHFGPPGRVKVANRVFTGPSEIEDENGQRKPTDEHVALLALRHWEDIPRAGCRLVPEHVETRP
LLNPDKPGIEQGRLELWVDMFPMDMPAPGTPLDISPRKPKKYELRVIIWNTDEVVLEDDDFFTGEKSSDIF
VRGWLKGQQEDKQDTDVHYHSLTGEGNFNWRYLFPFDYLAAEEKIVISKKESMFSWDETEYKIPARLTLQI
WDADHFSADDFLGAIELDLNRFPRGAKTAKQCTMEMATGEVDVPLVSIFKQKRVKGWWPLLARNENDEFEL
TGKVEAELHLLTAEEAEKNPVGLARNEPDPLEKPNRPDTSFIWFLNPLKSARYFLWHTYRWLLLKLLLLLL
LLLLLALFLYSVPGYLVKKILGA
Human Isoform 5 (short 4) (otoferlin protein) (also called otoferlin
isoform e) (NCBI Accession No. NP_001274418.1)
(SEQ ID NO: 12)
MALLIHLKTVSELRGRGDRIAKVTFRGQSFYSRVLENCEDVADFDETFRWPVASSIDRNEMLEIQVFNYSK
VFSNKLIGTFRMVLQKVVEESHVEVTDTLIDDNNAIIKTSLCVEVRYQATDGTVGSWDDGDFLGDESLQEE
EKDSQETDGLLPGSRPSSRPPGEKSFRRAGRSVFSAMKLGKNRSHKEEPQRPDEPAVLEMEDLDHLAIRLG
DGLDPDSVSLASVTALTTNVSNKRSKPDIKMEPSAGRPMDYQVSITVIEARQLVGLNMDPVVCVEVGDDKK
YTSMKESTNCPYYNEYFVFDFHVSPDVMFDKIIKISVIHSKNLLRSGTLVGSFKMDVGTVYSQPEHQFHHK
WAILSDPDDISSGLKGYVKCDVAVVGKGDNIKTPHKANETDEDDIEGNLLLPEGVPPERQWARFYVKIYRA
EGLPRMNTSLMANVKKAFIGENKDLVDPYVQVFFAGQKGKTSVQKSSYEPLWNEQVVFTDLFPPLCKRMKV
QIRDSDKVNDVAIGTHFIDLRKISNDGDKGFLPTLGPAWVNMYGSTRNYTLLDEHQDLNEGLGEGVSFRAR
LLLGLAVEIVDTSNPELTSSTEVQVEQATPISESCAGKMEEFFLFGAFLEASMIDRRNGDKPITFEVTIGN
YGNEVDGLSRPQRPRPRKEPGDEEEVDLIQNASDDEAGDAGDLASVSSTPPMRPQVTDRNYFHLPYLERKP
CIYIKSWWPDQRRRLYNANIMDHIADKLEEGLNDIQEMIKTEKSYPERRLRGVLEELSCGCCRFLSLADKD
QGHSSRTRLDRERLKSCMRELENMGQQARMLRAQVKRHTVRDKLRLCQNFLQKLRFLADEPQHSIPDIFIW
MMSNNKRVAYARVPSKDLLFSIVEEETGKDCAKVKTLFLKLPGKRGFGSAGWTVQAKVELYLWLGLSKQRK
EFLCGLPCGFQEVKAAQGLGLHAFPPVSLVYTKKQAFQLRAHMYQARSLFAADSSGLSDPFARVFFINQSQ
CTEVLNETLCPTWDQMLVFDNLELYGEAHELRDDPPIIVIEIYDQDSMGKADFMGRTFAKPLVKMADEAYC
PPRFPPQLEYYQIYRGNATAGDLLAAFELLQIGPAGKADLPPINGPVDVDRGPIMPVPMGIRPVLSKYRVE
VLFWGLRDLKRVNLAQVDRPRVDIECAGKGVQSSLIHNYKKNPNFNTLVKWFEVDLPENELLHPPLNIRVV
DCRAFGRYTLVGSHAVSSLRRFIYRPPDRSAPSWNTTVRLLRRCRVLCNGGSSSHSTGEVVVTMEPEVPIK
KLETMVKLDATSEAVVKVDVAEEEKEKKKKKKGTAEEPEEEEPDESMLDWWSKYFASIDTMKEQLRQQEPS
GIDLEEKEEVDNTEGLKGSMKGKEKARAAKEEKKKKTQSSGSGQGSEAPEKKKPKIDELKVYPKELESEFD
NFEDWLHTFNLLRGKTGDDEDGSTEEERIVGRFKGSLCVYKVPLPEDVSREAGYDSTYGMFQGIPSNDPIN
VLVRVYVVRATDLHPADINGKADPYIAIRLGKTDIRDKENYISKQLNPVFGKSFDIEASFPMESMLTVAVY
DWDLVGTDDLIGETKIDLENRFYSKHRATCGIAQTYSTHGYNIWRDPMKPSQILTRLCKDGKVDGPHFGPP
GRVKVANRVFTGPSEIEDENGQRKPTDEHVALLALRHWEDIPRAGCRLVPEHVETRPLLNPDKPGIEQGRL
ELWVDMFPMDMPAPGTPLDISPRKPKKYELRVIIWNTDEVVLEDDDFFTGEKSSDIFVRGWLKGQQEDKQD
TDVHYHSLTGEGNFNWRYLFPFDYLAAEEKIVISKKESMFSWDETEYKIPARLTLQIWDADHFSADDFLGA
IELDLNRFPRGAKTAKQCTMEMATGEVDVPLVSIFKQKRVKGWWPLLARNENDEFELTGKVEAELHLLTAE
EAEKNPVGLARNEPDPLEKPNRPDTAFVWFLNPLKSIKYLICTRYKWLIIKIVLALLGLLMLGLFLYSLPG
YMVKKLLGA
Complete cds (otoferlin cDNA) (encodes the protein of SEQ ID NO: 8)
(SEQ ID NO: 13)
atga tcaaaacgga gaagtcctac cctgagcgtc gcctgcgggg cgtcctggag gagctgagct
gtggctgctg ccgcttcctc tccctcgctg acaaggacca gggccactca tcccgcacca
ggcttgaccg ggagcgcctc aagtcctgca tgagggagct ggaaaacatg gggcagcagg
ccaggatgct gcgggcccag gtgaagcggc acacggtgcg ggacaagctg aggctgtgcc
agaacttcct gcagaagctg cgcttcctgg cggacgagcc ccagcacagc attcccgaca
tcttcatctg gatgatgagc aacaacaagc gtgtcgccta tgcccgtgtg ccctccaagg
acctgctctt ctccatcgtg gaggaggaga ctggcaagga ctgcgccaag gtcaagacgc
tcttccttaa gctgccaggg aagcggggct tcggctcggc aggctggaca gtgcaggcca
aggtggagct gtacctgtgg ctgggcctca gcaaacagcg caaggagttc ctgtgcggcc
tgccctgtgg cttccaggag gtcaaggcag cccagggcct gggcctgcat gccttcccac
ccgtcagcct ggtctacacc aagaagcagg cgttccagct ccgagcgcac atgtaccagg
cccgcagcct ctttgccgcc gacagcagcg gactctcaga cccctttgcc cgcgtcttct
tcatcaatca gagtcagtgc acagaggtgc tgaatgagac cctgtgtccc acctgggacc
agatgctggt gttcgacaac ctggagctct atggtgaagc tcatgagctg agggacgatc
cgcccatcat tgtcattgaa atctatgacc aggattccat gggcaaagct gacttcatgg
gccggacctt cgccaaaccc ctggtgaaga tggcagacga ggcgtactgc ccaccccgct
tcccacctca gctcgagtac taccagatct accgtggcaa cgccacagct ggagacccgc
tggcggcctt cgagctgctg cagattggac cagcagggaa ggctgacctg ccccccatca
atggcccggt ggacgtggac cgaggtccca tcatgcccgt gcccatgggc atccggcccg
tgctcagcaa gtaccgagtg gaggtgctgt tctggggcct acgggaccta aagcgggtga
acctggccca ggtggaccgg ccacgggtgg acatcgagtg tgcagggaag ggggtgcagt
cgtccctgat ccacaattat aagaagaacc ccaacttcaa caccctcgtc aagtggtttg
aagtggacct cccagagaac gagctgctgc acccgccctt gaacatccgt gtggtggact
gccgggcctt cggtcgctac acactggtgg gctcccatgc cgtcagctcc ctgcgacgct
tcatctaccg gcccccagac cgctcggccc ccagctggaa caccacgggg gaggttgtgg
tgactatgga gccagaggta cccatcaaga aactggagac catggtgaag ctggacgcga
cttctgaagc tgttgtcaag gtggatgtgg ctgaggagga gaaggagaag aagaagaaga
agaagggcac tgcggaggag ccagaggagg aggagccaga cgagagcatg ctggactggt
ggtccaagta ctttgcctcc attgacacca tgaaggagca acttcgacaa caagagccct
ctggaattga cttggaggag aaggaggaag tggacaatac cgagggcctg aaggggtcaa
tgaagggcaa ggagaaggca agggctgcca aagaggagaa gaagaagaaa actcagagct
ctggctctgg ccaggggtcc gaggcccccg agaagaagaa acccaagatt gatgagctta
aggtataccc caaagagctg gagtccgagt ttgataactt tgaggactgg ctgcacactt
tcaacttgct tcggggcaag accggggatg atgaggatgg ctccaccgag gaggagcgca
ttgtgggacg cttcaagggc tccctctgcg tgtacaaagt gccactccca gaggacgtgt
cccgggaagc cggctacgac tccacctacg gcatgttcca gggcatcccg agcaatgacc
ccatcaatgt gctggtccga gtctatgtgg tccgggccac ggacctgcac cctgctgaca
tcaacggcaa agctgacccc tacatcgcca tccggctagg caagactgac atccgcgaca
aggagaacta catctccaag cagctcaacc ctgtctttgg gaagtccttt gacatcgagg
cctccttccc catggaatcc atgctgacgg tggctgtgta tgactgggac ctggtgggca
ctgatgacct cattggggaa accaagatcg acctggagaa ccgcttctac agcaagcacc
gcgccacctg cggcatcgcc cagacctact ccacacatgg ctacaatatc tggcgggacc
ccatgaagcc cagccagatc ctgacccgcc tctgcaaaga cggcaaagtg gacggccccc
actttgggcc ccctgggaga gtgaaggtgg ccaaccgcgt cttcactggg ccctctgaga
ttgaggacga gaacggtcag aggaagccca cagacgagca tgtggcgctg ttggccctga
ggcactggga ggacatcccc cgcgcaggct gccgcctggt gccagagcat gtggagacga
ggccgctgct caaccccgac aagccgggca tcgagcaggg ccgcctggag ctgtgggtgg
acatgttccc catggacatg ccagcccctg ggacgcctct ggacatctca cctcggaagc
ccaagaagta cgagctgcgg gtcatcatct ggaacacaga tgaggtggtc ttggaggacg
acgacttctt cacaggggag aagtccagtg acatcttcgt gagggggtgg ctgaagggcc
agcaggagga caagcaggac acagacgtcc actaccactc cctcactggc gagggcaact
tcaactggcg ctacctgttc cccttcgact acctggcggc ggaggagaag atcgtcatct
ccaagaagga gtccatgttc tcctgggacg agaccgagta caagatcccc gcgcggctca
ccctgcagat ctgggatgcg gaccacttct ccgctgacga cttcctgggg gccatcgagc
tggacctgaa ccggttcccg cggggcgcaa agacagccaa gcagtgcacc atggagatgg
ccaccgggga ggtggacgtg cccctcgtgt ccatcttcaa gcaaaagcgc gtcaaaggct
ggtggcccct cctggcccgc aatgagaacg atgagtttga gctcacgggc aaggtggagg
ctgagctgca tttactgaca gcagaggagg cagagaagaa cccagtgggc ctggcccgca
atgaacctga ccccctagag aaacccaacc ggcccgacac gagcttcatc tggttcctga
accctctcaa gtcggctcgc tacttcttgt ggcacacgta tcgctggctg ctcctcaaac
tgttgctgct cctgctgctg ctcctcctcc tcgccctgtt cctctactct gtgcctggct
acctggtcaa gaaaatcctc ggggcctga
Human Otoferlin Transcript Variant 1 (encodes the protein of SEQ ID NO: 8)
(SEQ ID NO: 14)
atggccttgctca tccacctcaa gacagtctcg gagctgcggg gcaggggcga ccggatcgcc
aaagtgactt tccgagggca atccttctac tctcgggtcc tggagaactg tgaggatgtg
gctgactttg atgagacatt tcggtggccg gtggccagca gcatcgacag aaatgagatg
ctggagattc aggttttcaa ctacagcaaa gtcttcagca acaagctcat cgggaccttc
cgcatggtgc tgcagaaggt ggtagaggag agccatgtgg aggtgactga cacgctgatt
gatgacaaca atgctatcat caagaccagc ctgtgcgtgg aggtccggta tcaggccact
gacggcacag tgggctcctg ggacgatggg gacttcctgg gagatgagtc tcttcaagag
gaagagaagg acagccaaga gacggatgga ctgctcccag gctcccggcc cagctcccgg
cccccaggag agaagagctt ccggagagcc gggaggagcg tgttctccgc catgaagctc
ggcaaaaacc ggtctcacaa ggaggagccc caaagaccag atgaaccggc ggtgctggag
atggaagacc ttgaccatct ggccattcgg ctaggagatg gactggatcc cgactcggtg
tctctagcct cagtcacagc tctcaccact aatgtctcca acaagcgatc taagccagac
attaagatgg agccaagtgc tgggcggccc atggattacc aggtcagcat cacggtgatc
gaggcccggc agctggtggg cttgaacatg gaccctgtgg tgtgcgtgga ggtgggtgac
gacaagaagt acacatccat gaaggagtcc actaactgcc cctattacaa cgagtacttc
gtcttcgact tccatgtctc tccggatgtc atgtttgaca agatcatcaa gatttcggtg
attcactcca agaacctgct gcgcagtggc accctggtgg gctccttcaa aatggacgtg
ggaaccgtgt actcgcagcc agagcaccag ttccatcaca agtgggccat cctgtctgac
cccgatgaca tctcctcggg gctgaagggc tacgtgaagt gtgacgttgc cgtggtgggc
aaaggggaca acatcaagac gccccacaag gccaatgaga ccgacgaaga tgacattgag
gggaacttgc tgctccccga gggggtgccc cccgaacgcc agtgggcccg gttctatgtg
aaaatttacc gagcagaggg gctgccccgt atgaacacaa gcctcatggc caatgtaaag
aaggctttca tcggtgaaaa caaggacctc gtggacccct acgtgcaagt cttctttgct
ggccagaagg gcaagacttc agtgcagaag agcagctatg agcccctgtg gaatgagcag
gtcgtcttta cagacctctt ccccccactc tgcaaacgca tgaaggtgca gatccgagac
tcggacaagg tcaacgacgt ggccatcggc acccacttca ttgacctgcg caagatttct
aatgacggag acaaaggctt cctgcccaca ctgggcccag cctgggtgaa catgtacggc
tccacacgta actacacgct gctggatgag catcaggacc tgaacgaggg cctgggggag
ggtgtgtcct tccgggcccg gctcctgctg ggcctggctg tggagatcgt agacacctcc
aaccctgagc tcaccagctc cacagaggtg caggtggagc aggccacgcc catctcggag
agctgtgcag gtaaaatgga agaattcttt ctctttggag ccttcctgga ggcctcaatg
atcgaccgga gaaacggaga caagcccatc acctttgagg tcaccatagg caactatggg
aacgaagttg atggcctgtc ccggccccag cggcctcggc cccggaagga gccgggggat
gaggaagaag tagacctgat tcagaacgca agtgatgacg aggccggtga tgccggggac
ctggcctcag tctcctccac tccaccaatg cggccccagg tcaccgacag gaactacttc
catctgccct acctggagcg aaagccctgc atctacatca agagctggtg gccggaccag
cgccgccgcc tctacaatgc caacatcatg gaccacattg ccgacaagct ggaagaaggc
ctgaacgaca tacaggagat gatcaaaacg gagaagtcct accctgagcg tcgcctgcgg
ggcgtcctgg aggagctgag ctgtggctgc tgccgcttcc tctccctcgc tgacaaggac
cagggccact catcccgcac caggcttgac cgggagcgcc tcaagtcctg catgagggag
ctggaaaaca tggggcagca ggccaggatg ctgcgggccc aggtgaagcg gcacacggtg
cgggacaagc tgaggctgtg ccagaacttc ctgcagaagc tgcgcttcct ggcggacgag
ccccagcaca gcattcccga catcttcatc tggatgatga gcaacaacaa gcgtgtcgcc
tatgcccgtg tgccctccaa ggacctgctc ttctccatcg tggaggagga gactggcaag
gactgcgcca aggtcaagac gctcttcctt aagctgccag ggaagcgggg cttcggctcg
gcaggctgga cagtgcaggc caaggtggag ctgtacctgt ggctgggcct cagcaaacag
cgcaaggagt tcctgtgcgg cctgccctgt ggcttccagg aggtcaaggc agcccagggc
ctgggcctgc atgccttccc acccgtcagc ctggtctaca ccaagaagca ggcgttccag
ctccgagcgc acatgtacca ggcccgcagc ctctttgccg ccgacagcag cggactctca
gacccctttg cccgcgtctt cttcatcaat cagagtcagt gcacagaggt gctgaatgag
accctgtgtc ccacctggga ccagatgctg gtgttcgaca acctggagct ctatggtgaa
gctcatgagc tgagggacga tccgcccatc attgtcattg aaatctatga ccaggattcc
atgggcaaag ctgacttcat gggccggacc ttcgccaaac ccctggtgaa gatggcagac
gaggcgtact gcccaccccg cttcccacct cagctcgagt actaccagat ctaccgtggc
aacgccacag ctggagacct gctggcggcc ttcgagctgc tgcagattgg accagcaggg
aaggctgacc tgccccccat caatggcccg gtggacgtgg accgaggtcc catcatgccc
gtgcccatgg gcatccggcc cgtgctcagc aagtaccgag tggaggtgct gttctggggc
ctacgggacc taaagcgggt gaacctggcc caggtggacc ggccacgggt ggacatcgag
tgtgcaggga agggggtgca gtcgtccctg atccacaatt ataagaagaa ccccaacttc
aacaccctcg tcaagtggtt tgaagtggac ctcccagaga acgagctgct gcacccgccc
ttgaacatcc gtgtggtgga ctgccgggcc ttcggtcgct acacactggt gggctcccat
gccgtcagct ccctgcgacg cttcatctac cggcccccag accgctcggc ccccagctgg
aacaccacgg tcaggcttct ccggcgctgc cgtgtgctgt gcaatggggg ctcctcctct
cactccacag gggaggttgt ggtgactatg gagccagagg tacccatcaa gaaactggag
accatggtga agctggacgc gacttctgaa gctgttgtca aggtggatgt ggctgaggag
gagaaggaga agaagaagaa gaagaagggc actgcggagg agccagagga ggaggagcca
gacgagagca tgctggactg gtggtccaag tactttgcct ccattgacac catgaaggag
caacttcgac aacaagagcc ctctggaatt gacttggagg agaaggagga agtggacaat
accgagggcc tgaaggggtc aatgaagggc aaggagaagg caagggctgc caaagaggag
aagaagaaga aaactcagag ctctggctct ggccaggggt ccgaggcccc cgagaagaag
aaacccaaga ttgatgagct taaggtatac cccaaagagc tggagtccga gtttgataac
tttgaggact ggctgcacac tttcaacttg cttcggggca agaccgggga tgatgaggat
ggctccaccg aggaggagcg cattgtggga cgcttcaagg gctccctctg cgtgtacaaa
gtgccactcc cagaggacgt gtcccgggaa gccggctacg actccaccta cggcatgttc
cagggcatcc cgagcaatga ccccatcaat gtgctggtcc gagtctatgt ggtccgggcc
acggacctgc accctgctga catcaacggc aaagctgacc cctacatcgc catccggcta
ggcaagactg acatccgcga caaggagaac tacatctcca agcagctcaa ccctgtcttt
gggaagtcct ttgacatcga ggcctccttc cccatggaat ccatgctgac ggtggctgtg
tatgactggg acctggtggg cactgatgac ctcattgggg aaaccaagat cgacctggag
aaccgcttct acagcaagca ccgcgccacc tgcggcatcg cccagaccta ctccacacat
ggctacaata tctggcggga ccccatgaag cccagccaga tcctgacccg cctctgcaaa
gacggcaaag tggacggccc ccactttggg ccccctggga gagtgaaggt ggccaaccgc
gtcttcactg ggccctctga gattgaggac gagaacggtc agaggaagcc cacagacgag
catgtggcgc tgttggccct gaggcactgg gaggacatcc cccgcgcagg ctgccgcctg
gtgccagagc atgtggagac gaggccgctg ctcaaccccg acaagccggg catcgagcag
ggccgcctgg agctgtgggt ggacatgttc cccatggaca tgccagcccc tgggacgcct
ctggacatct cacctcggaa gcccaagaag tacgagctgc gggtcatcat ctggaacaca
gatgaggtgg tcttggagga cgacgacttc ttcacagggg agaagtccag tgacatcttc
gtgagggggt ggctgaaggg ccagcaggag gacaagcagg acacagacgt ccactaccac
tccctcactg gcgagggcaa cttcaactgg cgctacctgt tccccttcga ctacctggcg
gcggaggaga agatcgtcat ctccaagaag gagtccatgt tctcctggga cgagaccgag
tacaagatcc ccgcgcggct caccctgcag atctgggatg cggaccactt ctccgctgac
gacttcctgg gggccatcga gctggacctg aaccggttcc cgcggggcgc aaagacagcc
aagcagtgca ccatggagat ggccaccggg gaggtggacg tgcccctcgt gtccatcttc
aagcaaaagc gcgtcaaagg ctggtggccc ctcctggccc gcaatgagaa cgatgagttt
gagctcacgg gcaaggtgga ggctgagctg catttactga cagcagagga ggcagagaag
aacccagtgg gcctggcccg caatgaacct gaccccctag agaaacccaa ccggcccgac
acgagcttca tctggttcct gaaccctctc aagtcggctc gctacttctt gtggcacacg
tatcgctggc tgctcctcaa actgttgctg ctcctgctgc tgctcctcct cctcgccctg
ttcctctact ctgtgcctgg ctacctggtc aagaaaatcc tcggggcctg a
Human Otoferlin Transcript Variant 2 (encodes the protein of SEQ ID NO: 11)
(SEQ ID NO: 15)
atgatcaaaacgga gaagtcctac cctgagcgtc gcctgcgggg cgtcctggag gagctgagct
gtggctgctg ccgcttcctc tccctcgctg acaaggacca gggccactca tcccgcacca
ggcttgaccg ggagcgcctc aagtcctgca tgagggagct ggaaaacatg gggcagcagg
ccaggatgct gcgggcccag gtgaagcggc acacggtgcg ggacaagctg aggctgtgcc
agaacttcct gcagaagctg cgcttcctgg cggacgagcc ccagcacagc attcccgaca
tcttcatctg gatgatgagc aacaacaagc gtgtcgccta tgcccgtgtg ccctccaagg
acctgctctt ctccatcgtg gaggaggaga ctggcaagga ctgcgccaag gtcaagacgc
tcttccttaa gctgccaggg aagcggggct tcggctcggc aggctggaca gtgcaggcca
aggtggagct gtacctgtgg ctgggcctca gcaaacagcg caaggagttc ctgtgcggcc
tgccctgtgg cttccaggag gtcaaggcag cccagggcct gggcctgcat gccttcccac
ccgtcagcct ggtctacacc aagaagcagg cgttccagct ccgagcgcac atgtaccagg
cccgcagcct ctttgccgcc gacagcagcg gactctcaga cccctttgcc cgcgtcttct
tcatcaatca gagtcagtgc acagaggtgc tgaatgagac cctgtgtccc acctgggacc
agatgctggt gttcgacaac ctggagctct atggtgaagc tcatgagctg agggacgatc
cgcccatcat tgtcattgaa atctatgacc aggattccat gggcaaagct gacttcatgg
gccggacctt cgccaaaccc ctggtgaaga tggcagacga ggcgtactgc ccaccccgct
tcccacctca gctcgagtac taccagatct accgtggcaa cgccacagct ggagacctgc
tggcggcctt cgagctgctg cagattggac cagcagggaa ggctgacctg ccccccatca
atggcccggt ggacgtggac cgaggtccca tcatgcccgt gcccatgggc atccggcccg
tgctcagcaa gtaccgagtg gaggtgctgt tctggggcct acgggaccta aagcgggtga
acctggccca ggtggaccgg ccacgggtgg acatcgagtg tgcagggaag ggggtgcagt
cgtccctgat ccacaattat aagaagaacc ccaacttcaa caccctcgtc aagtggtttg
aagtggacct cccagagaac gagctgctgc acccgccctt gaacatccgt gtggtggact
gccgggcctt cggtcgctac acactggtgg gctcccatgc cgtcagctcc ctgcgacgct
tcatctaccg gcccccagac cgctcggccc ccagctggaa caccacgggg gaggttgtgg
tgactatgga gccagaggta cccatcaaga aactggagac catggtgaag ctggacgcga
cttctgaagc tgttgtcaag gtggatgtgg ctgaggagga gaaggagaag aagaagaaga
agaagggcac tgcggaggag ccagaggagg aggagccaga cgagagcatg ctggactggt
ggtccaagta ctttgcctcc attgacacca tgaaggagca acttcgacaa caagagccct
ctggaattga cttggaggag aaggaggaag tggacaatac cgagggcctg aaggggtcaa
tgaagggcaa ggagaaggca agggctgcca aagaggagaa gaagaagaaa actcagagct
ctggctctgg ccaggggtcc gaggcccccg agaagaagaa acccaagatt gatgagctta
aggtataccc caaagagctg gagtccgagt ttgataactt tgaggactgg ctgcacactt
tcaacttgct tcggggcaag accggggatg atgaggatgg ctccaccgag gaggagcgca
ttgtgggacg cttcaagggc tccctctgcg tgtacaaagt gccactccca gaggacgtgt
cccgggaagc cggctacgac tccacctacg gcatgttcca gggcatcccg agcaatgacc
ccatcaatgt gctggtccga gtctatgtgg tccgggccac ggacctgcac cctgctgaca
tcaacggcaa agctgacccc tacatcgcca tccggctagg caagactgac atccgcgaca
aggagaacta catctccaag cagctcaacc ctgtctttgg gaagtccttt gacatcgagg
cctccttccc catggaatcc atgctgacgg tggctgtgta tgactgggac ctggtgggca
ctgatgacct cattggggaa accaagatcg acctggagaa ccgcttctac agcaagcacc
gcgccacctg cggcatcgcc cagacctact ccacacatgg ctacaatatc tggcgggacc
ccatgaagcc cagccagatc ctgacccgcc tctgcaaaga cggcaaagtg gacggccccc
actttgggcc ccctgggaga gtgaaggtgg ccaaccgcgt cttcactggg ccctctgaga
ttgaggacga gaacggtcag aggaagccca cagacgagca tgtggcgctg ttggccctga
ggcactggga ggacatcccc cgcgcaggct gccgcctggt gccagagcat gtggagacga
ggccgctgct caaccccgac aagccgggca tcgagcaggg ccgcctggag ctgtgggtgg
acatgttccc catggacatg ccagcccctg ggacgcctct ggacatctca cctcggaagc
ccaagaagta cgagctgcgg gtcatcatct ggaacacaga tgaggtggtc ttggaggacg
acgacttctt cacaggggag aagtccagtg acatcttcgt gagggggtgg ctgaagggcc
agcaggagga caagcaggac acagacgtcc actaccactc cctcactggc gagggcaact
tcaactggcg ctacctgttc cccttcgact acctggcggc ggaggagaag atcgtcatct
ccaagaagga gtccatgttc tcctgggacg agaccgagta caagatcccc gcgcggctca
ccctgcagat ctgggatgcg gaccacttct ccgctgacga cttcctgggg gccatcgagc
tggacctgaa ccggttcccg cggggcgcaa agacagccaa gcagtgcacc atggagatgg
ccaccgggga ggtggacgtg cccctcgtgt ccatcttcaa gcaaaagcgc gtcaaaggct
ggtggcccct cctggcccgc aatgagaacg atgagtttga gctcacgggc aaggtggagg
ctgagctgca tttactgaca gcagaggagg cagagaagaa cccagtgggc ctggcccgca
atgaacctga ccccctagag aaacccaacc ggcccgacac gagcttcatc tggttcctga
accctctcaa gtcggctcgc tacttcttgt ggcacacgta tcgctggctg ctcctcaaac
tgttgctgct cctgctgctg ctcctcctcc tcgccctgtt cctctactct gtgcctggct
acctggtcaa gaaaatcctc ggggcctga
Human Otoferlin Transcript Variant 3 (encodes the protein of SEQ ID NO: 8)
(SEQ ID NO: 16)
atgatgaccga tactcaggat ggccctagcg agagctccca gatcatgagg tccctcactc
ccctgatcaa cagggaggag gcatttgggg aggctgggga ggcggggctg tggcccagca
tcacccacac tcctgattca caggaagaag gcctgaacga catacaggag atgatcaaaa
cggagaagtc ctaccctgag cgtcgcctgc ggggcgtcct ggaggagctg agctgtggct
gctgccgctt cctctccctc gctgacaagg accagggcca ctcatcccgc accaggcttg
accgggagcg cctcaagtcc tgcatgaggg agctggaaaa catggggcag caggccagga
tgctgcgggc ccaggtgaag cggcacacgg tgcgggacaa gctgaggctg tgccagaact
tcctgcagaa gctgcgcttc ctggcggacg agccccagca cagcattccc gacatcttca
tctggatgat gagcaacaac aagcgtgtcg cctatgcccg tgtgccctcc aaggacctgc
tcttctccat cgtggaggag gagactggca aggactgcgc caaggtcaag acgctcttcc
ttaagctgcc agggaagcgg ggcttcggct cggcaggctg gacagtgcag gccaaggtgg
agctgtacct gtggctgggc ctcagcaaac agcgcaagga gttcctgtgc ggcctgccct
gtggcttcca ggaggtcaag gcagcccagg gcctgggcct gcatgccttc ccacccgtca
gcctggtcta caccaagaag caggcgttcc agctccgagc gcacatgtac caggcccgca
gcctctttgc cgccgacagc agcggactct cagacccctt tgcccgcgtc ttcttcatca
atcagagtca gtgcacagag gtgctgaatg agaccctgtg tcccacctgg gaccagatgc
tggtgttcga caacctggag ctctatggtg aagctcatga gctgagggac gatccgccca
tcattgtcat tgaaatctat gaccaggatt ccatgggcaa agctgacttc atgggccgga
ccttcgccaa acccctggtg aagatggcag acgaggcgta ctgcccaccc cgcttcccac
ctcagctcga gtactaccag atctaccgtg gcaacgccac agctggagac ctgctggcgg
ccttcgagct gctgcagatt ggaccagcag ggaaggctga cctgcccccc atcaatggcc
cggtggacgt ggaccgaggt cccatcatgc ccgtgcccat gggcatccgg cccgtgctca
gcaagtaccg agtggaggtg ctgttctggg gcctacggga cctaaagcgg gtgaacctgg
cccaggtgga ccggccacgg gtggacatcg agtgtgcagg gaagggggtg cagtcgtccc
tgatccacaa ttataagaag aaccccaact tcaacaccct cgtcaagtgg tttgaagtgg
acctcccaga gaacgagctg ctgcacccgc ccttgaacat ccgtgtggtg gactgccggg
ccttcggtcg ctacacactg gtgggctccc atgccgtcag ctccctgcga cgcttcatct
accggccccc agaccgctcg gcccccagct ggaacaccac ggtcaggctt ctccggcgct
gccgtgtgct gtgcaatggg ggctcctcct ctcactccac aggggaggtt gtggtgacta
tggagccaga ggtacccatc aagaaactgg agaccatggt gaagctggac gcgacttctg
aagctgttgt caaggtggat gtggctgagg aggagaagga gaagaagaag aagaagaagg
gcactgcgga ggagccagag gaggaggagc cagacgagag catgctggac tggtggtcca
agtactttgc ctccattgac accatgaagg agcaacttcg acaacaagag ccctctggaa
ttgacttgga ggagaaggag gaagtggaca ataccgaggg cctgaagggg tcaatgaagg
gcaaggagaa ggcaagggct gccaaagagg agaagaagaa gaaaactcag agctctggct
ctggccaggg gtccgaggcc cccgagaaga agaaacccaa gattgatgag cttaaggtat
accccaaaga gctggagtcc gagtttgata actttgagga ctggctgcac actttcaact
tgcttcgggg caagaccggg gatgatgagg atggctccac cgaggaggag cgcattgtgg
gacgcttcaa gggctccctc tgcgtgtaca aagtgccact cccagaggac gtgtcccggg
aagccggcta cgactccacc tacggcatgt tccagggcat cccgagcaat gaccccatca
atgtgctggt ccgagtctat gtggtccggg ccacggacct gcaccctgct gacatcaacg
gcaaagctga cccctacatc gccatccggc taggcaagac tgacatccgc gacaaggaga
actacatctc caagcagctc aaccctgtct ttgggaagtc ctttgacatc gaggcctcct
tccccatgga atccatgctg acggtggctg tgtatgactg ggacctggtg ggcactgatg
acctcattgg ggaaaccaag atcgacctgg agaaccgctt ctacagcaag caccgcgcca
cctgcggcat cgcccagacc tactccacac atggctacaa tatctggcgg gaccccatga
agcccagcca gatcctgacc cgcctctgca aagacggcaa agtggacggc ccccactttg
ggccccctgg gagagtgaag gtggccaacc gcgtcttcac tgggccctct gagattgagg
acgagaacgg tcagaggaag cccacagacg agcatgtggc gctgttggcc ctgaggcact
gggaggacat cccccgcgca ggctgccgcc tggtgccaga gcatgtggag acgaggccgc
tgctcaaccc cgacaagccg ggcatcgagc agggccgcct ggagctgtgg gtggacatgt
tccccatgga catgccagcc cctgggacgc ctctggacat ctcacctcgg aagcccaaga
agtacgagct gcgggtcatc atctggaaca cagatgaggt ggtcttggag gacgacgact
tcttcacagg ggagaagtcc agtgacatct tcgtgagggg gtggctgaag ggccagcagg
aggacaagca ggacacagac gtccactacc actccctcac tggcgagggc aacttcaact
ggcgctacct gttccccttc gactacctgg cggcggagga gaagatcgtc atctccaaga
aggagtccat gttctcctgg gacgagaccg agtacaagat ccccgcgcgg ctcaccctgc
agatctggga tgcggaccac ttctccgctg acgacttcct gggggccatc gagctggacc
tgaaccggtt cccgcggggc gcaaagacag ccaagcagtg caccatggag atggccaccg
gggaggtgga cgtgcccctc gtgtccatct tcaagcaaaa gcgcgtcaaa ggctggtggc
ccctcctggc ccgcaatgag aacgatgagt ttgagctcac gggcaaggtg gaggctgagc
tgcatttact gacagcagag gaggcagaga agaacccagt gggcctggcc cgcaatgaac
ctgaccccct agagaaaccc aaccggcccg acacgagctt catctggttc ctgaaccctc
tcaagtcggc tcgctacttc ttgtggcaca cgtatcgctg gctgctcctc aaactgttgc
tgctcctgct gctgctcctc ctcctcgccc tgttcctcta ctctgtgcct ggctacctgg
tcaagaaaat cctcggggcc tga
Human Otoferlin Transcript Variant 4 (encodes the protein of SEQ ID NO: 9)
(SEQ ID NO: 17)
atga tcaaaacgga gaagtcctac cctgagcgtc gcctgcgggg cgtcctggag gagctgagct
gtggctgctg ccgcttcctc tccctcgctg acaaggacca gggccactca tcccgcacca
ggcttgaccg ggagcgcctc aagtcctgca tgagggagct ggaaaacatg gggcagcagg
ccaggatgct gcgggcccag gtgaagcggc acacggtgcg ggacaagctg aggctgtgcc
agaacttcct gcagaagctg cgcttcctgg cggacgagcc ccagcacagc attcccgaca
tcttcatctg gatgatgagc aacaacaagc gtgtcgccta tgcccgtgtg ccctccaagg
acctgctctt ctccatcgtg gaggaggaga ctggcaagga ctgcgccaag gtcaagacgc
tcttccttaa gctgccaggg aagcggggct tcggctcggc aggctggaca gtgcaggcca
aggtggagct gtacctgtgg ctgggcctca gcaaacagcg caaggagttc ctgtgcggcc
tgccctgtgg cttccaggag gtcaaggcag cccagggcct gggcctgcat gccttcccac
ccgtcagcct ggtctacacc aagaagcagg cgttccagct ccgagcgcac atgtaccagg
cccgcagcct ctttgccgcc gacagcagcg gactctcaga cccctttgcc cgcgtcttct
tcatcaatca gagtcagtgc acagaggtgc tgaatgagac cctgtgtccc acctgggacc
agatgctggt gttcgacaac ctggagctct atggtgaagc tcatgagctg agggacgatc
cgcccatcat tgtcattgaa atctatgacc aggattccat gggcaaagct gacttcatgg
gccggacctt cgccaaaccc ctggtgaaga tggcagacga ggcgtactgc ccaccccgct
tcccacctca gctcgagtac taccagatct accgtggcaa cgccacagct ggagacctgc
tggcggcctt cgagctgctg cagattggac cagcagggaa ggctgacctg ccccccatca
atggcccggt ggacgtggac cgaggtccca tcatgcccgt gcccatgggc atccggcccg
tgctcagcaa gtaccgagtg gaggtgctgt tctggggcct acgggaccta aagcgggtga
acctggccca ggtggaccgg ccacgggtgg acatcgagtg tgcagggaag ggggtgcagt
cgtccctgat ccacaattat aagaagaacc ccaacttcaa caccctcgtc aagtggtttg
aagtggacct cccagagaac gagctgctgc acccgccctt gaacatccgt gtggtggact
gccgggcctt cggtcgctac acactggtgg gctcccatgc cgtcagctcc ctgcgacgct
tcatctaccg gcccccagac cgctcggccc ccagctggaa caccacgggg gaggttgtgg
tgactatgga gccagaggta cccatcaaga aactggagac catggtgaag ctggacgcga
cttctgaagc tgttgtcaag gtggatgtgg ctgaggagga gaaggagaag aagaagaaga
agaagggcac tgcggaggag ccagaggagg aggagccaga cgagagcatg ctggactggt
ggtccaagta ctttgcctcc attgacacca tgaaggagca acttcgacaa caagagccct
ctggaattga cttggaggag aaggaggaag tggacaatac cgagggcctg aaggggtcaa
tgaagggcaa ggagaaggca agggctgcca aagaggagaa gaagaagaaa actcagagct
ctggctctgg ccaggggtcc gaggcccccg agaagaagaa acccaagatt gatgagctta
aggtataccc caaagagctg gagtccgagt ttgataactt tgaggactgg ctgcacactt
tcaacttgct tcggggcaag accggggatg atgaggatgg ctccaccgag gaggagcgca
ttgtgggacg cttcaagggc tccctctgcg tgtacaaagt gccactccca gaggacgtgt
cccgggaagc cggctacgac tccacctacg gcatgttcca gggcatcccg agcaatgacc
ccatcaatgt gctggtccga gtctatgtgg tccgggccac ggacctgcac cctgctgaca
tcaacggcaa agctgacccc tacatcgcca tccggctagg caagactgac atccgcgaca
aggagaacta catctccaag cagctcaacc ctgtctttgg gaagtccttt gacatcgagg
cctccttccc catggaatcc atgctgacgg tggctgtgta tgactgggac ctggtgggca
ctgatgacct cattggggaa accaagatcg acctggagaa ccgcttctac agcaagcacc
gcgccacctg cggcatcgcc cagacctact ccacacatgg ctacaatatc tggcgggacc
ccatgaagcc cagccagatc ctgacccgcc tctgcaaaga cggcaaagtg gacggccccc
actttgggcc ccctgggaga gtgaaggtgg ccaaccgcgt cttcactggg ccctctgaga
ttgaggacga gaacggtcag aggaagccca cagacgagca tgtggcgctg ttggccctga
ggcactggga ggacatcccc cgcgcaggct gccgcctggt gccagagcat gtggagacga
ggccgctgct caaccccgac aagccgggca tcgagcaggg ccgcctggag ctgtgggtgg
acatgttccc catggacatg ccagcccctg ggacgcctct ggacatctca cctcggaagc
ccaagaagta cgagctgcgg gtcatcatct ggaacacaga tgaggtggtc ttggaggacg
acgacttctt cacaggggag aagtccagtg acatcttcgt gagggggtgg ctgaagggcc
agcaggagga caagcaggac acagacgtcc actaccactc cctcactggc gagggcaact
tcaactggcg ctacctgttc cccttcgact acctggcggc ggaggagaag atcgtcatct
ccaagaagga cctggcccgc aatgagaacg atgagtttga gctcacgggc aaggtggagg
ctgagctgca tttactgaca gcagaggagg cagagaagaa cccagtgggc ctggcccgca
atgaacctga ccccctagag aaacccaacc ggcccgacac ggccttcgtc tggttcctca
accctctcaa gtccatcaag tacctcatct gcacccggta caagtggctc atcatcaaga
tcgtgctggc gctgttgggg ctgctcatgt tggggctctt cctctacagc ctccctggct
acatggtcaa aaagctcctt ggggcatga
Human Otoferlin Transcript Variant 5 (encodes the protein of SEQ ID NO: 12)
(SEQ ID NO: 18)
atg gccttgctca tccacctcaa gacagtctcg gagctgcggg gcaggggcga ccggatcgcc
aaagtgactt tccgagggca atccttctac tctcgggtcc tggagaactg tgaggatgtg
gctgactttg atgagacatt tcggtggccg gtggccagca gcatcgacag aaatgagatg
ctggagattc aggttttcaa ctacagcaaa gtcttcagca acaagctcat cgggaccttc
cgcatggtgc tgcagaaggt ggtagaggag agccatgtgg aggtgactga cacgctgatt
gatgacaaca atgctatcat caagaccagc ctgtgcgtgg aggtccggta tcaggccact
gacggcacag tgggctcctg ggacgatggg gacttcctgg gagatgagtc tcttcaagag
gaagagaagg acagccaaga gacggatgga ctgctcccag gctcccggcc cagctcccgg
cccccaggag agaagagctt ccggagagcc gggaggagcg tgttctccgc catgaagctc
ggcaaaaacc ggtctcacaa ggaggagccc caaagaccag atgaaccggc ggtgctggag
atggaagacc ttgaccatct ggccattcgg ctaggagatg gactggatcc cgactcggtg
tctctagcct cagtcacagc tctcaccact aatgtctcca acaagcgatc taagccagac
attaagatgg agccaagtgc tgggcggccc atggattacc aggtcagcat cacggtgatc
gaggcccggc agctggtggg cttgaacatg gaccctgtgg tgtgcttgga ggtgggtgac
gacaagaagt acacatccat gaaggagtcc actaactgcc cctattacaa cgagtacttc
gtcttcgact tccatgtctc tccggatgtc atgtttgaca agatcatcaa gatttcggtg
attcactcca agaacctgct gcgcagtggc accctggtgg gctccttcaa aatggacgtg
ggaaccgtgt actcgcagcc agagcaccag ttccatcaca agtgggccat cctgtctgac
cccgatgaca tctcctcggg gctgaagggc tacgtgaagt gtgacgttgc cgtggtgggc
aaaggggaca acatcaagac gccccacaag gccaatgaga ccgacgaaga tgacattgag
gggaacttgc tgctccccga gggggtgccc cccgaacgcc agtgggcccg gttctatgtg
aaaatttacc gagcagaggg gctgccccgt atgaacacaa gcctcatggc caatgtaaag
aaggctttca tcggtgaaaa caaggacctc gtggacccct acgtgcaagt cttctttgct
ggccagaagg gcaagacttc agtgcagaag agcagctatg agcccctgtg gaatgagcag
gtcgtcttta cagacctctt ccccccactc tgcaaacgca tgaaggtgca gatccgagac
tcggacaagg tcaacgacgt ggccatcggc acccacttca ttgacctgcg caagatttct
aatgacggag acaaaggctt cctgcccaca ctgggcccag cctgggtgaa catgtacggc
tccacacgta actacacgct gctggatgag catcaggacc tgaacgaggg cctgggggag
ggtgtgtcct tccgggcccg gctcctgctg ggcctggctg tggagatcgt agacacctcc
aaccctgagc tcaccagctc cacagaggtg caggtggagc aggccacgcc catctcggag
agctgtgcag gtaaaatgga agaattcttt ctctttggag ccttcctgga ggcctcaatg
atcgaccgga gaaacggaga caagcccatc acctttgagg tcaccatagg caactatggg
aacgaagttg atggcctgtc ccggccccag cggcctcggc cccggaagga gccgggggat
gaggaagaag tagacctgat tcagaacgca agtgatgacg aggccggtga tgccggggac
ctggcctcag tctcctccac tccaccaatg cggccccagg tcaccgacag gaactacttc
catctgccct acctggagcg aaagccctgc atctacatca agagctggtg gccggaccag
cgccgccgcc tctacaatgc caacatcatg gaccacattg ccgacaagct ggaagaaggc
ctgaacgaca tacaggagat gatcaaaacg gagaagtcct accctgagcg tcgcctgcgg
ggcgtcctgg aggagctgag ctgtggctgc tgccgcttcc tctccctcgc tgacaaggac
cagggccact catcccgcac caggcttgac cgggagcgcc tcaagtcctg catgagggag
ctggaaaaca tggggcagca ggccaggatg ctgcgggccc aggtgaagcg gcacacggtg
cgggacaagc tgaggctgtg ccagaacttc ctgcagaagc tgcgcttcct ggcggacgag
ccccagcaca gcattcccga catcttcatc tggatgatga gcaacaacaa gcgtgtcgcc
tatgcccgtg tgccctccaa ggacctgctc ttctccatcg tggaggagga gactggcaag
gactgcgcca aggtcaagac gctcttcctt aagctgccag ggaagcgggg cttcggctcg
gcaggctgga cagtgcaggc caaggtggag ctgtacctgt ggctgggcct cagcaaacag
cgcaaggagt tcctgtgcgg cctgccctgt ggcttccagg aggtcaaggc agcccagggc
ctgggcctgc atgccttccc acccgtcagc ctggtctaca ccaagaagca ggcgttccag
ctccgagcgc acatgtacca ggcccgcagc ctctttgccg ccgacagcag cggactctca
gacccctttg cccgcgtctt cttcatcaat cagagtcagt gcacagaggt gctgaatgag
accctgtgtc ccacctggga ccagatgctg gtgttcgaca acctggagct ctatggtgaa
gctcatgagc tgagggacga tccgcccatc attgtcattg aaatctatga ccaggattcc
atgggcaaag ctgacttcat gggccggacc ttcgccaaac ccctggtgaa gatggcagac
gaggcgtact gcccaccccg cttcccacct cagctcgagt actaccagat ctaccgtggc
aacgccacag ctggagacct gctggcggcc ttcgagctgc tgcagattgg accagcaggg
aaggctgacc tgccccccat caatggcccg gtggacgtgg accgaggtcc catcatgccc
gtgcccatgg gcatccggcc cgtgctcagc aagtaccgag tggaggtgct gttctggggc
ctacgggacc taaagcgggt gaacctggcc caggtggacc ggccacgggt ggacatcgag
tgtgcaggga agggggtgca gtcttccctg atccacaatt ataagaagaa ccccaacttc
aacaccctcg tcaagtggtt tgaagtggac ctcccagaga acgagctgct gcacccgccc
ttgaacatcc gtgtggtgga ctgccgggcc ttcggtcgct acacactggt gggctcccat
gccgtcagct ccctgcgacg cttcatctac cggcccccag accgctcggc ccccagctgg
aacaccacgg tcaggcttct ccggcgctgc cgtgtgctgt gcaatggggg ctcctcctct
cactccacag gggaggttgt ggtgactatg gagccagagg tacccatcaa gaaactggag
accatggtga agctggacgc gacttctgaa gctgttgtca aggtggatgt ggctgaggag
gagaaggaga agaagaagaa gaagaagggc actgcggagg agccagagga ggaggagcca
gacgagagca tgctggactg gtggtccaag tactttgcct ccattgacac catgaaggag
caacttcgac aacaagagcc ctctggaatt gacttggagg agaaggagga agtggacaat
accgagggcc tgaaggggtc aatgaagggc aaggagaagg caagggctgc caaagaggag
aagaagaaga aaactcagag ctctggctct ggccaggggt ccgaggcccc cgagaagaag
aaacccaaga ttgatgagct taaggtatac cccaaagagc tggagtccga gtttgataac
tttgaggact ggctgcacac tttcaacttg cttcggggca agaccgggga tgatgaggat
ggctccaccg aggaggagcg cattgtggga cgcttcaagg gctccctctg cgtgtacaaa
gtgccactcc cagaggacgt gtcccgggaa gccggctacg actccaccta cggcatgttc
cagggcatcc cgagcaatga ccccatcaat gtgctggtcc gagtctatgt ggtccgggcc
acggacctgc accctgctga catcaacggc aaagctgacc cctacatcgc catccggcta
ggcaagactg acatccgcga caaggagaac tacatctcca agcagctcaa ccctgtcttt
gggaagtcct ttgacatcga ggcctccttc cccatggaat ccatgctgac ggtggctgtg
tatgactggg acctggtggg cactgatgac ctcattgggg aaaccaagat cgacctggag
aaccgcttct acagcaagca ccgcgccacc tgcggcatcg cccagaccta ctccacacat
ggctacaata tctggcggga ccccatgaag cccagccaga tcctgacccg cctctgcaaa
gacggcaaag tggacggccc ccactttggg ccccctggga gagtgaaggt ggccaaccgc
gtcttcactg ggccctctga gattgaggac gagaacggtc agaggaagcc cacagacgag
catgtggcgc tgttggccct gaggcactgg gaggacatcc cccgcgcagg ctgccgcctg
gtgccagagc atgtggagac gaggccgctg ctcaaccccg acaagccggg catcgagcag
ggccgcctgg agctgtgggt ggacatgttc cccatggaca tgccagcccc tgggacgcct
ctggacatct cacctcggaa gcccaagaag tacgagctgc gggtcatcat ctggaacaca
gatgaggtgg tcttggagga cgacgacttc ttcacagggg agaagtccag tgacatcttc
gtgagggggt ggctgaaggg ccagcaggag gacaagcagg acacagacgt ccactaccac
tccctcactg gcgagggcaa cttcaactgg cgctacctgt tccccttcga ctacctggcg
gcggaggaga agatcgtcat ctccaagaag gagtccatgt tctcctggga cgagaccgag
tacaagatcc ccgcgcggct caccctgcag atctgggatg cggaccactt ctccgctgac
gacttcctgg gggccatcga gctggacctg aaccggttcc cgcggggcgc aaagacagcc
aagcagtgca ccatggagat ggccaccggg gaggtggacg tgcccctcgt gtccatcttc
aagcaaaagc gcgtcaaagg ctggtggccc ctcctggccc gcaatgagaa cgatgagttt
gagctcacgg gcaaggtgga ggctgagctg catttactga cagcagagga ggcagagaag
aacccagtgg gcctggcccg caatgaacct gaccccctag agaaacccaa ccggcccgac
acggccttcg tctggttcct caaccctctc aagtccatca agtacctcat ctgcacccgg
tacaagtggc tcatcatcaa gatcgtgctg gcgctgttgg ggctgctcat gttggggctc
ttcctctaca gcctccctgg ctacatggtc aaaaagctcc ttggggcatg a

[0132] A non-limiting example of a human wildtype otoferlin genomic DNA sequence is SEQ ID NO: 19. The exons in SEQ ID NO: 19 are: nucleotide positions 5001-5206 (exon 1), nucleotide positions 25925-25983 (exon 2), nucleotide positions 35779-35867 (exon 3), nucleotide positions 44590-44689 (exon 4), nucleotide positions 47100-47281 (exon 5), nucleotide positions 59854-59927 (exon 6), nucleotide positions 61273-61399 (exon 7), nucleotide positions 61891-61945 (exon 8), nucleotide positions 68626-68757(exon 9), nucleotide positions 73959-74021 (exon 10), nucleotide positions 74404-74488 (exon 11), nucleotide positions 79066-79225 (exon 12), nucleotide positions 80051-80237 (exon 13), nucleotide positions 81107-81293 (exon 14), nucleotide positions 82690-82913 (exon 15), nucleotide positions 83388-83496 (exon 16), nucleotide positions 84046-84226 (exon 17), nucleotide positions 84315-84435 (exon 18), nucleotide positions 85950-86050 (exon 19), nucleotide positions 86193-86283 (exon 20), nucleotide positions 86411-86527 (exon 21), nucleotide positions 86656-86808 (exon 22), nucleotide positions 87382-87571 (exon 23), nucleotide positions 87661-87785 (exon 24), nucleotide positions 88206-88340 (exon 25), nucleotide positions 89025-89186 (exon 26), nucleotide positions 89589-89708 (exon 27), nucleotide positions 90132-90293 (exon 28), nucleotide positions 90405-90567 (exon 29), nucleotide positions 91050-91180 (exon 30), nucleotide positions 92549-92578 (exon 31), nucleotide positions 92978-93106 (exon 32), nucleotide positions 95225-95291 (exon 33), nucleotide positions 96198-96334 (exon 34), nucleotide positions 96466-96600 (exon 35), nucleotide positions 96848-96985 (exon 36), nucleotide positions 97623-97750 (exon 37), nucleotide positions 97857-98027 (exon 38), nucleotide positions 98670-98830 (exon 39), nucleotide positions 99593-99735 (exon 40), nucleotide positions 100128-100216 (exon 41), nucleotide positions 101518-101616 (exon 42), nucleotide positions 101762-102003 (exon 43), nucleotide positions 102669-102847 (exon 44), nucleotide positions 102952-103052 (exon 45), nucleotide positions 103494-103691 (exon 46), nucleotide positions 105479-106496 (exon 47), and exon 48 (the sequence starting with CCGGCCCGAC (SEQ ID NO: 89); see also the description of this exon in Yasunaga et al., Am. J. Hum. Genet. 67:591-600, 2000).

[0133] The introns are located between each contiguous pair of exons in SEQ ID NO: 19, i.e., at nucleotide positions 100-5001 (intron 1), nucleotide 5207-25924 (intron 2), nucleotide positions 25984-35778 (intron 3), nucleotide positions 35868-44589 (intron 4), nucleotide positions 44690-47099 (intron 5), nucleotide positions 47282-59853(intron 6), nucleotide positions 59928-61272 (intron 7), nucleotide positions 61400-61890 (intron 8), nucleotide positions 61946-68625 (intron 9), nucleotide positions 68758-73958 (intron 10), nucleotide positions 74022-74403 (intron 11), nucleotide positions 74489-79065 (intron 12), nucleotide positions 79226-80050 (intron 13), nucleotide positions 80238-81106 (intron 14), nucleotide positions 81294-82689 (intron 15), nucleotide positions 82914-83387 (intron 16), nucleotide positions 83497-84045 (intron 17), nucleotide positions 84227-84314 (intron 18), nucleotide positions 84436-85949 (intron 19), nucleotide positions 86051-86192 (intron 20), nucleotide positions 86284-86410 (intron 21), nucleotide positions 86528-86655 (intron 22), nucleotide positions 86809-87381 (intron 23), nucleotide positions 87572-87660 (intron 24), nucleotide positions 87786-88205 (intron 25), nucleotide positions 88341-89024 (intron 26), nucleotide positions 89187-89588 (intron 27), nucleotide positions 89709-90131 (intron 28), nucleotide positions 90294-90404 (intron 29), nucleotide positions 90568-91049 (intron 30), nucleotide positions 91181-92548 (intron 31), nucleotide positions 92579-92977 (intron 32), nucleotide positions 93107-95224 (intron 33), nucleotide positions 95292-96197 (intron 34), nucleotide positions 96335-96465 (intron 35), nucleotide positions 96601-96847 (intron 36), nucleotide positions 96986-97622 (intron 37), nucleotide positions 97751-97856 (intron 38), nucleotide positions 98028-98669 (intron 39), nucleotide positions 98831-99592 (intron 40), nucleotide positions 99736-100127 (intron 41), nucleotide positions 100217-101517 (intron 42), nucleotide positions 101617-101761 (intron 43), nucleotide positions 102004-102668 (intron 44), nucleotide positions 102848-102951 (intron 45), nucleotide positions 103053-103494 (intron 46), nucleotide positions 103692-105478 (intron 47), and nucleotide positions 106497-108496 (intron 48).

| Human Otoferlin Gene Sequence (NCBI Accession No. NG_009937.1) | |
|---|---|
| (SEQ ID NO: 19) | |
| 1 | gggagagcat gcgggctttt tcacccattt ggagactctg cctgcagaat cctcaagaca |
| 61 | ttcatttcat tcattcgttc actctttttt tcagacaagg gttcttagga tcattcattc |
| 121 | attctataca gatttgctga tactgtacag gttgcctctc agaatccagt gcctgttctc |
| 181 | agtacctatg ctgactggta ggagggataa agacagcctt acaccctggg agaggcggtc |
| 241 | cagagtagaa acatcagaca ctgtaggaga aagagccaaa gaacaggagg caacagccag |
| 301 | acttgcatgt tagatggttg gagtctgaaa atatccagag taaagaaagg taggtgtaac |
| 361 | ctagtatttg aaagtgctaa acagcaagcc agcgctcagg gcaagtggcc aggaagcttt |
| 421 | ccaagaaaaa cttctgggag gataaaggga ggtctgtgaa aggaccgacc gcaaagtcgg |
| 481 | gcgggtactg cacacatgac ccattaacta cggctcttcc ggccttgcca ggttcttcga |
| 541 | gcgggcaccc acccggtatc cttccctcct tcaaccaaca agtactgacc ttgcccgaat |
| 601 | gctgggtgct ggccctgtgc gccggacgga agggcctgat tttctcgcat tttctctaag |
| 661 | cgctggaggc tgcccgcctg gggcgtctcc aagcactaaa ccccacgtgg ctccatctcc |
| 721 | tcccccttcc ccggctacat ccatgcgagg tcccttatgc cctgctggct gtgccccact |
| 781 | tgccagggag cgccttcctg tgaaggggaa tctggggagg cccccgcccg tgcctgccca |
| 841 | cttcctactc tgaaaccaca aacctctagg aaggcccctc gccccgtcgg gtggaaaatt |
| 901 | ggctcctcgg ggttccttca accccaaagt ccgggggcag ggggctgaat ttcgatcacc |
| 961 | gaggagggcg ctagtggaag ggggagggga ggaggcgctc cctcggcctt acccgggcat |
| 1021 | gagtccaggg ggcacgtagg cggcattgaa ctcggtcagt agggtgcccg cgctgcggga |
| 1081 | ggccatggtg ggtgcgcgag tacagcgagc ctggcgctcc gctccgcccc acggtaaaca |
| 1141 | gcggcgggtc acctggcaac ggccacggcg gcgagcctgg caacgccagc tggccccgcg |
| 1201 | gtcctcgcgt tccgagacac tgcgcccccc tggcggccac ctcccggagc agccccatag |
| 1261 | ggcgcgccca gaaggcgcct cccatttccg cgagctctgc tgggtgaccc ctgtcacttg |
| 1321 | ccccggcgcg tcggggctct ctgccttgct gcctgcggga tgtgcagagg ctcagatgcg |
| 1381 | ggagggaggc agaacatcgc tggagaggcc tggcgggatc cgtcttgcgg tgacccggct |
| 1441 | tggaacgcga cgctaccaca aaggacaggc caggtcctga ctttggaggt cacgcacgaa |
| 1501 | gcagctgccc caccgtggct caggcccaga aacctgagtg gccttagggt ccccaggagc |
| 1561 | tatgtctctc caaggcttcc cctgcacccc agctccatgg gagttccagg aaggggctct |
| 1621 | gtagtgggcc gcgctgggcg aggttgccta ggacgctgtg tgtaattgtg tgtgtgcgtg |
| 1681 | cgtgcgtgca tgtgtgcgtg tgtgtgtgcg cgccttgcga agaggagcat ttttcatttt |
| 1741 | tcttcttaat ctctagctga tggcttcctt ctcacctcat catacctgta aactactcca |
| 1801 | caagaggcaa aaagaaaatc atagaacgtc tgggtgtgtg atttacattt gtccccaatg |
| 1861 | ctgccgttca ttttggggat ggcatccgca ggggtagcgc ttgccccaga gagcaggcct |
| 1921 | gctgaaggcc caccccctgt gtaatcctcc ctgtgactgc ttcagcctcc acatttgagt |
| 1981 | ttctccaggg acccttacac cagccttggt gcctagggca ggcacagggc cttcggcttt |
| 2041 | tccataaggg gtgagggtat ggggacagct tccacggtgc caggctcttg gtgactcggg |
| 2101 | tggaggccct gccaccccag ctccctctgc agcagtcctg gtgtcatgaa gaagcctggc |
| 2161 | agttcccact ttgtctccag gtcttgcttc ttcccttcag atgccggatg gagagcagtg |
| 2221 | ctcccctcgc acttcggttc tgtaaatggc agtggatgaa gaccgcagac gctactgggt |
| 2281 | tcacagaatg tggctgccac cagcattctc caaagacttc ccctggcaaa tgccaatgaa |
| 2341 | atgaagggga gccacaggct tcccagaggc tcaggaagca gaaacactga ggcctggttg |
| 2401 | gaaagagagc tgtaggcaaa ggaacggctg caaacaaact gggtggaagg aaaatccatc |
| 2461 | catccttcag aatgcagtca tgtctgtatt tttctaaatt ctcattgggg aacatgttct |
| 2521 | acaataagga aaacatgagt caaagacccc cagccctggt gaggttgacc gcctacttcc |
| 2581 | tcccccattc agggctgccc agccagtcct gctggtaaac ccaccaccct gccttccacc |
| 2641 | tgcctgtgtt ctagtccatc tgtctcgtct gattgggatc ctgtgccatc catatcatat |
| 2701 | tcatccctga atctcagcac ctggctctgg aaagaattca gtaaatgttc attacataaa |
| 2761 | ttatatactc agttaccaaa atgggtaaca gaagaatgga aattaaaaag tgggttctgg |
| 2821 | ctgggaacgg tggctcatgc ctgtaatccc agcattttgg aaggccgagg caggcggatc |
| 2881 | acttgaggtc agcagtttga gaccagccta gccaacatgg tgaaacccca tctctactaa |
| 2941 | aaatacaaac attagctggg catggtagca catgcttata gtctgaccta tttgggaggc |
| 3001 | tgaggcagga gaatcgcttg aacccgggag gcagaggttg cagtgagcct agatcactcc |
| 3061 | actgccctcc agcctgggtg acagagtgag actctctctc aaaaaaaaaa aaaaaaaaag |
| 3121 | agtgggatct gtctcttagg ttttcagaaa ggccagctga ctccattgag agctgctgag |
| 3181 | tggaattgct accattttat ggatgtggaa agtgagattc agcatagatc aatgccttgg |
| 3241 | ctagggcagg atcatgggct ttttcctaaa gatgcacagg gtctataaga ggcctcatga |
| 3301 | aattcactcc tttcagggga ggacctccag agaaccaagg aagaagatat tttctgttgt |
| 3361 | tgttgttgta ccttgtagtc accaagcctt aaaaacacag atcacctgat gacctcatgg |
| 3421 | atggaaaatg ctagtgaatt taggtgtttt tttttttaag acattaaact tatctagctt |
| 3481 | ttgaaaattt agcattcata cttgtattca ataaacagaa tactctaaga catttttaaa |
| 3541 | ttcaatatga ttagataaat gtgagaaagg taagcaagaa ttggttagga aaaagtgcaa |
| 3601 | aggaaaaaaa cgtaagtaga aaaagaaaaa tagggcacag tagcaaggaa atatctagaa |
| 3661 | ggaggaaaga aggctcttgg gacatactgt aggttatttg gaatgcagaa ttcaaaagaa |
| 3721 | gtaacctctt gttaccatgc tgtgaaaaat tagtatttct ctttttaacc tttagactct |
| 3781 | gtttcaggta gatccctgag ctcactcttt tatcctttca acagtaattg ggcatcctac |
| 3841 | ggtgcacagg ataccatgtg gggctctggg gtagagggat gctgtgctcc agggccctcc |
| 3901 | tgaggtcagg aggggaaaag gcaagggaag cagccccagg actcagtaag atgagaggag |
| 3961 | gcaggagcag cacagaggag gaccccaacc cagctggggt gcgggtacag aggcacctcc |
| 4021 | aggagcaggc actcaagctg agtccagggt ggggtggagg gcattccacc aagaatgaat |
| 4081 | agcaagaaca aggctgcaga tgaccctgca cagattccag catcagggat tctggccccc |
| 4141 | agcgtccctt tccttggtgt atgctgctgg aagacaggag ggggcagttc tcttttggtc |
| 4201 | cttagaaatt tccctataga catcccttct cctgccccta gcagcttata acagcagaag |
| 4261 | gccattcaat tctgctcctc tggctggaaa gcaaacatca gcctggctta ccttcgctag |
| 4321 | cctgcctgac ccccagcctt ggggtggggc taggttagtg ccctggatcc ttaaacatgg |
| 4381 | cccctggtag cacataagcc tctgctgcct ccacaaccag ccatctccat catgcatggc |
| 4441 | ctggtcctga gcctcccctc aggcagcagc cccagcctct ctgcttcctg agattcagaa |
| 4501 | acagggatcc cagggcaggg ctcagggccc agcctcttgg gggcacagtc tccagcaggg |
| 4561 | aagaggtggg cgtaggtgga caaatacatt cccttcttct tgtagtgtgc ccctgtgggt |
| 4621 | gggagtgccc cccgccccac atccacccta cctatgctca tgcccactcc tctgtgccca |
| 4681 | ctactggtgg cagggcttgc ttagcaggga agcagcagag ccctgcagag gggtgggcag |
| 4741 | agcctccctt ccaggagctg ggagaagaca cctgaagctg gacagagctt tatctgggag |
| 4801 | ccggcggctg ctgaataatg aattccaact ctgccgcact cccaggctgc acattgggtg |
| 4861 | cacacacaca cacacacaca cgcacacacc gatacacaca cgctgggctg acaacttgga |
| 4921 | ggggcggggg ctgtgaggct ctgtgagtcg ctgcaggagc agcttagctc ggcttggttg |
| 4981 | ccttggtctc tgtgggcagc atcggagggg ggtcgggagg aggaggagga ggcagcggca |
| 5041 | gagaagagag aggcgtgtga gccgtgctcc accggctagc tccttcccgc tgctcctgcc |
| 5101 | tggcagtgcc aggcagccca caccagcatg gccttgctca tccacctcaa gacagtctcg |
| 5161 | gagctgcggg gcaggggcga ccggatcgcc aaagtgactt tccgaggtag ggaagccgct |
| 5221 | gtctcagagg gacgccagct ctgagagctg gaccagccca tgctctggag gtggccgggg |
| 5281 | ataggacagg gctgggagga tgggtgggaa aagttctagc aggggctggg gcgacgagcc |
| 5341 | ttttcacagg tagtcatctg cctgggactg actggccatt gtgatttctg gaaaatcagg |
| 5401 | gtcccctgtt cttccatgcc tgtgtctcct tgtgcttgcc aacatgccag ttccccgggc |
| 5461 | agggcacaga gccctctgcc tggggaggca gaagtgagga ccacatccct gagctcaggg |
| 5521 | agacccagga ccccctcctt ctctctctct ccctctcctg caggttgatt tccttgagca |
| 5581 | cagggtgggg gccgggtatg gagcctgggg cacccagggt gactgggaga aaccaggcag |
| 5641 | ccagtagctc cctgggcccc agagtgatgg gggacactgt tggcttcttt tagatctatt |
| 5701 | catgggcggg aaccccggga gcccctcgcc tctcttctgt ctggtctttt ctcatccttt |
| 5761 | tcactcctgt attcagcgac catttattat gatctactgt gtcccaagga taggggtaga |
| 5821 | aacacagagc tgagcacaac ccagccccag ccccaaggag cctgcatctg ttgggcaggc |
| 5881 | gtggaacaag caggacaggt atgtgagaca gaaggtgggg gtgcagcatg caagctacag |
| 5941 | aagcagcacc ctcacccagg ctggtgaccg gtggtcaggg aaggcttccc ggaggaagta |
| 6001 | acactcagct aatacccgaa ggaccagcgg gtgggagcta ggagaggagg taaggactga |
| 6061 | ggaggcagag gaaacagtgt gcccagagct gagagaggag ctgaaactct ggaactgaaa |
| 6121 | gaggttccat gtgtctacag ctcagagagg gtgcaggagc ggaggccaga gagccaagca |
| 6181 | gggcaaggag gcgaggctgg acctgacccc ggggacagcg gagcccctga gcattttaag |
| 6241 | tggggaaagg cagggccagg ctgactctgt ccttcaccac ccacctctgc ctctccatgt |
| 6301 | ggttgctgcc cagccctgag ggttgggggt acttctcact agacatggcc ccttctcccg |
| 6361 | agagaggggt ctgagagtgg gatggggacg aggtggtgag aagggggcag agaggacccc |
| 6421 | cctatactaa agagcaaagt gagccttggg gcccaggctg gacacagtgt ctgcacctct |
| 6481 | gttggaaggg atgggagaga ccattggcag aacattccag caagagccct ggggcaccca |
| 6541 | catcacctac ccagaggccc tgggatgccc acattgcagc ttgtgttcat agggacaggc |
| 6601 | aggggtggag gtgatggcag tggccctgcc ggcaggcgga ggttaggcag gagggagagg |
| 6661 | gaggtgtggg ctgggctgcc ttttgcctcc caccccaacc cactgactgc tttctctgca |
| 6721 | gcaccctgga tctccctctg tgtgccacct gcaggctcat gctggcttta gaaaaagcaa |
| 6781 | atgtgtcctt tcatctgtga aatgtggccc tgagctccac gggcagcata gtgtggggcg |
| 6841 | gttaagctac aggttgccat cctgctgcag ctgtgctgga acggtccagg ctgcaccgga |
| 6901 | caggcccact tgcaggccga gaaaccaagg ttcaggggta gaacactgcg cgtggcattc |
| 6961 | acggaggagc tgaggcacgg tggtcccagc tctcaggacc tcatcctgag tactcaatct |
| 7021 | tgcaagctct ttatctgctc ctgggccacc tgggggccag caccttgtct gacacccatc |
| 7081 | ttctccttgg agcagtgaag ggctgggcct ttagcctcac tgaccacaca ggaattagtt |
| 7141 | tatttgcaac ccttgctctc tggactgagt ggagaaatcg cttccaagct ccacattggc |
| 7201 | aggaggtggc catgggcaga gctcctgggg aagggggctg ggcagcagga ataggcagat |
| 7261 | gacaagcagt ttccagaaag tacctttatt acaacgaaag atgcctcagc cgctcacctg |
| 7321 | tgtcatctag cagttcacag ttgtaggcgc cccaaaagac caacactgac cacaattcag |
| 7381 | agggaatgga cccgctctac aatgttcctt agcatctccc agcacatgca accactgggg |
| 7441 | gccaagcaag tcctctgcag ggggaaacaa gaaactggta aacacgcaga gggagacact |
| 7501 | ggccccaggc tccccaaggc ttttgagtga aagtcaatgc cgggggaggt ggtgagggag |
| 7561 | cccttggtga gctgtgccca ttggcagtgg ccctaggtag gccagagcag ctggttgaaa |
| 7621 | tatggcttga ccttctgtgc tgtgccatcc aagacactaa ggaaagagcc ctcctgggct |
| 7681 | attgtggaaa aagttctgga tatggagtca gaagccctag atcctacctg ggttctgcca |
| 7741 | ctcaccctca gtttcctcat ctgtaaaatg ggcatgataa taacactcac ttcactagat |
| 7801 | tgcttcaggg aaaccatagg tatggaagag tttgtgggaa gagtattcaa atggtcgatg |
| 7861 | tgtttgtgag gcagccattc ccattctcct tgggagcagc tgctggcccc tgaggtatct |
| 7921 | tctctccaga ccagcagagg gccccatgtg agatataaag ggaagaggag agcacgtcta |
| 7981 | aggggttcca gtctgccagg agaaggcaga gagcctggac tctgctctgt aggagcctct |
| 8041 | gctgagatgt tccgcaggaa cccaggcagg cagacccccg agactcctgt tctcatctgg |
| 8101 | ctgggtgtgc accagctttg cccgtggcca cctcttttcc cactgccctc aggccagtcg |
| 8161 | gcccctcggt cagtgctccc agccagttct gtatctagct cttagttctt actgcccctg |
| 8221 | gctgctccta agctggtgct gccctgttca tgcatttcct gaacatgcta atatttgtgc |
| 8281 | acaggcctgg gaccctgagg tgaaggggcc agcctggccc tccaggagtc acaatcccat |
| 8341 | tgggtcagac aggagatagg gagtcctggg cgaatctcta ttgtgcctgc aggccacagg |
| 8401 | gctcagctgg gtttctcatt aacaaaatgg agacagtggt cctcatttag ctcagaggcc |
| 8461 | tgcagttccc aggagtaatc aagagtgggc tatctaagaa ggagccatct tgaccacagg |
| 8521 | ttgctactca aagagaggaa gtattagctt caggtatttc ctttatcaac tcctgagata |
| 8581 | gttccctaca tcaatcacag agccacagaa cgcagggtgt gaagggtccc gaagttcttc |
| 8641 | tagtccaacc ttctgtccag tgctgagcac caaggctggg ggacctggac tgtaagggaa |
| 8701 | ccaagtgaca gacagtccag ggccaaccct gatgtctccc ttctctttct atcccctgag |
| 8761 | ccttcttgcc aagacatgag gtttggggat tttctgtgtg agataagaac atctaaaggc |
| 8821 | tggatctggc ttccacataa ttcactgtgg ctggaaattg gcacaaaggt ttgcagggca |
| 8881 | tccccctcca ccttttcatt cttactcttc ttcccaccct ccccctgatt cccaccctgc |
| 8941 | tatgttccca ctacattcaa cttccagcca ttcccaaaag ataccacacc cttttacacc |
| 9001 | tccaaacttt gagacatcga tcatatttct tctgcctgga atgaccaccc tccaccttga |
| 9061 | gaacgcccat taattctgct catccttcaa ggcccagctc atatgctacc tcctccatga |
| 9121 | aggagtagta ctttgcacac aaagtactcc tctagcagta ctttgcacac attcttccta |
| 9181 | ctgctctgcc aaggtacatt gcatttcaga aactggccac acctctgcat gctgcccaag |
| 9241 | cttttgagca tcttcaggac agacatcaga catggtttct gtctttgagg gattcactgt |
| 9301 | gtcatgggtt tgagttcttc cactgtggca ctgtcactct ttggctccat ttccccaact |
| 9361 | gtgagctctc accccagaac tttctatcca aggaggatca agggactgga agaggcctca |
| 9421 | agggccaaga accaagaacc ttggctctta ctccttccat caacttccct aacccagaga |
| 9481 | atcttctagg gctccagagg ggcctaacga tttttttttt tttttttttt tttgagtctc |
| 9541 | gctctgtcgc caggctggag tgcagtgcag tgcgatctcg gctcactgca acctccagct |
| 9601 | cctgggttca agcgattctt ctgcctcagc ctctggagta gctgggacta caggcacacg |
| 9661 | ccaccatgcc cgactaattt ttgtattttt agtagagacg gtgtttcacc atatttccca |
| 9721 | ggctggtctc aaactcctga cctcatgatc cgcctgcctc ggcctcccaa agtgctggga |
| 9781 | ttacaggtgt gagccactgc gcccagtcaa gcctaacaaa tattagcaag ttcagctcca |
| 9841 | gcccataggt gggaagcaag agggattgcg tgtgtaagcc agagtcagtt aggggaagac |
| 9901 | agaggaagga gaaagggcag acgggaaagg aggtgggagc aggctctgag ttggcccccg |
| 9961 | gagctcagaa gggaggcggg agtttttatt gagcagggga aatgggcggt atttaagaag |
| 10021 | ccaccgaagg gtcttagttc attggcagga tcaaaggcca tgaaagggcc aggcgtggtg |
| 10081 | gctcatgcct ctttccgagc cttactgcga ccacacgtgg ggcaggatct caccatctga |
| 10141 | cagaggagaa gaaacataca cacagaggtg aaatgagtgc agcatacagg agggccagcg |
| 10201 | gtgggggtaa atagcaacaa tgttcagagg atgacagctt acttagagct acagagacga |
| 10261 | gggaaaagga gcaggaggag gaagtgccta agctgggtct tgaaaaactg cccctgtttg |
| 10321 | tacctatgga gatgcaggaa gtgaggaatt ggtgatggag gaaggtgaag tctttttggg |
| 10381 | tgagggaccg accagaccag aggccagagg aggagaattg cagccaagtt ccatgtcggg |
| 10441 | gaagccacac catgtagctg gagcagaggc tataggaagt agaagaggga gaccagctag |
| 10501 | ggagggagca gtgggcctgc tgagtgattg tgcagggaag ggttgcagct gaggcactgg |
| 10561 | ggacaagatg tccccctact gttggctgca ggctccacct ctgactccac attacattta |
| 10621 | ttttccccag taaaatgagg gagccctccc tcttgatgat aaatatagct actatttgga |
| 10681 | aacttatctg ccgcccctgg taaaggaggc agaataccca gtgcacccac ccctgaaatg |
| 10741 | ctcctgcaat gcctaggcct gtctgtgggc tgtggtccag cctagcaccc cctctcttgg |
| 10801 | agaatgtgag gttggcattg tccctgctga aggcagcaat agaggggacc cttacgacga |
| 10861 | ccttggcagc cggtggctgg ctgtggacac agccctgcgc ttttgtttta gtcctaacgg |
| 10921 | atatgccccc tgcatcctcc attcttcaca gcacactcag tccccctcac cacacctgag |
| 10981 | ggaaatcttc tctgcctaat gccccacgta gtgaatgttc tcccctcctc cctcccccag |
| 11041 | agcaagccat tgcacaccag cgaagggcag acagagcaca cagaaaattc cccagacttc |
| 11101 | tgctttgata ggaagtgtat tttcatgtaa tggaaatgat tgtaaaactg ccttcccctg |
| 11161 | caaaagccct caggaatatg ctgctggaaa tgtgcttgag aacagacttg caaatcattt |
| 11221 | ctctgaattg ggaagtcttg gttatcttag ccacttttac cgatcatgtg aaagccacat |
| 11281 | ctctcgcacc cactcccatc cctgggtctc atttttttct tttttctgtc gcccacgctg |
| 11341 | gagtgcagtg gcacaatcat agttcactgc aacctcaacc tcctgggttc aagcgatgct |
| 11401 | cccacctcag cctcccgagt agctaggact acaggcacgc accaccatgc tcagctaatt |
| 11461 | tttgtatttt tagtagagat ggggtttcac catattgccc aggctggtct tgaactcccg |
| 11521 | ggctcatgtg agctgcctgg ctcagcctcc caaagtgctg ggattatagg cgtaagccac |
| 11581 | tgtgcctggc cttttttttt tttttttaac tttttatata taaaaaaact ctcaaataca |
| 11641 | tacaagagtg gggagaacag tatcatggcc ctatgttgta ccatccaatt tcagctacca |
| 11701 | tcaattcatg gccaatcttg cttcatttgc atcccatcct acttcctcac cccaaattat |
| 11761 | tttgaagaag atcccaaacc ccataccatt ccatctgtaa atattcagta cacagttata |
| 11821 | aaagataaga gctcaaataa ataccacata ctttgtcatt ttaaagaaat taataacaat |
| 11881 | tccttagtac tataaactaa tcaggcagtc atcaaattcc taattgtctc atcaatgtca |
| 11941 | taattttttt ccaatttatt aaaagcttca ttttaatgtg ttttgtaaat caggtattta |
| 12001 | atcatttatc cactcgttct gttgaagggc agccatgtgc cacgcactgg gggatggtgg |
| 12061 | ggaatgagac agatgtggtt cctgtcctca aagggggaag atgaccactg cacccatcat |
| 12121 | catgaggagc tttatggaag ggaggcacag gtgcccaggc agctcatggt gaggaaaccc |
| 12181 | acttagccca ggatgggggg aagccacccc agtgcgtgag ccagagtcag ttaggggaag |
| 12241 | actgaggaag gaggaagggc agatgggaag ggagggagga gcaggctcct agttggcccc |
| 12301 | tagagcccgg aagtgagtca ggagttttta ttgagcagga ggaatgggcg gtatttaaga |
| 12361 | agcccttgaa gggtcgcagc tcattggcag gaacaaaggc catgaaaggg ctgggcatgg |
| 12421 | tggctcacgc ctgtaatccc agcactttgg gaggccaagg cgggggggat catttgaggg |
| 12481 | caggagtttg agaccagcct ggccaacatg gtgaaaccac atctctacta aaaacacaaa |
| 12541 | aattagccgg gcgtggtggt gcacgcctat aatcccagct actcgggagg ctgaggcagg |
| 12601 | agaatcgctt gaacccagga ggcagaggct gcagtgagcc gagattgtgc cactgcactc |
| 12661 | cagcctgggc gacagagcga gactctgtct caaggggggg aaaaaagcca tgaaaggctc |
| 12721 | catcccaggc agaggggcta acactagtgc agacgtggtg gtgtggagat gcatcagggg |
| 12781 | agtgtggagg ggagaccgga aggcagggca cgggggacgc agccaaacac ggagggtctt |
| 12841 | tggtgtcaca ctcttagcag gagaatggga tgctaagatc ttgttttgga gagaaggctc |
| 12901 | tagaggtgag gactgcgggc agggacactg gggaggaagc ccggggcagg cggagggctg |
| 12961 | agtgcctcag caggcgccat gagagaggaa ggagcggcgc tgggatcagg ggagtgagtg |
| 13021 | acagggcagg gcaagagtca attgtggtcc tggggaccac cgcggaccca gggatttggg |
| 13081 | gtacagggcc ttagttgatt ctcatctaga caggtgccag ttgctgacac cctgaattct |
| 13141 | ggcaaacatg gagacatcag ggtggaaaca cctggagcca ctgccatcca ggtgggcgcc |
| 13201 | ttgagggcca ggccccttgg ctgctttccc agcagcagca tggagcctgg cacagaacag |
| 13261 | acctggcata gaagtgggag caaggaacac cgcctgtggg tgcaggagca gtgatcagtt |
| 13321 | agcaacaggg gcccccctgc agccagccat ccaggcagca ccagacagtg atccatttct |
| 13381 | ctcggtgaca gttctagaaa aggctccgga gacagggact atcatgtgat catttttacc |
| 13441 | ctagaccgct tgaccgcttt ctgtctgaac tgatccacct gctagacgct gcctcaacag |
| 13501 | tcctcgtttc tattttattt tcttttactt caaagcagaa gggctaatct gctgaggtgg |
| 13561 | agacgagttt tcacccactg gctttttttt ttttcagccg aagtttaagg taaagtcagg |
| 13621 | actgcagttt ccacaatatt tttaccctat cggagagtaa aagagtcacc ctcccattat |
| 13681 | acctcattgt attcccagtg cctggcacag aatgggtact ctacacactt gtggatcact |
| 13741 | gggaccacaa gctcctctgt caccgtaaca ggggaatcta ggacccagca gttgatgact |
| 13801 | gtgtgggtgg cactgtccaa ggctcaaaga caaataccac aggcccttcc tgcctcagtg |
| 13861 | ccagggtctg aaaaatggga accagcgctt tcagtcggtt gcagggcaaa gtcagagttt |
| 13921 | gagtgaggac ctggaagaag ggtttgagct gagccagaga gatgggattt atcatccctg |
| 13981 | ccctgcccct gcctctcaga tgaatccctg acccaagcct aagtttccat agtgtaaacc |
| 14041 | tggatgttag cagggtgggt taaggggaaa tacatgagtg gaggtagaaa tgatatttta |
| 14101 | gtacaatttg tggataataa agggttagag ttccatgggg cctccattta gctgagaaat |
| 14161 | ggggaaaatg gaaggggtaa ccttttccag tgggaggccc agggactctg cagtatccca |
| 14221 | agtctggctc tgtgagtcat tggtgatttt cagagagtat actatgtaag aaacatgagg |
| 14281 | aacagctgct ttcttggaca actctttgaa gtgaatttct ttcttctacc atgccatcaa |
| 14341 | ctgtcattat aaaattgaag atgtgtttct catggggaaa aaaattgtta ttacaagaga |
| 14401 | tatgggcaat tagacaagtc tcaatacatt tcaaaagact gaaatcttac agagtatgtt |
| 14461 | ctctgaccat agtggaattc agctaaaaat caataataag aagattatct ttgaaagttc |
| 14521 | caaatatttg gaaattaatg cctttcttaa cctatggtca aagaaggaag taaaagagaa |
| 14581 | attatgaaac atttttaact gaattataat gaaaatacaa catattaaca tttatcattt |
| 14641 | taagtactta cagcagaaaa gaagaaaagt gtaaaattgt aatctaggtt tctgccttaa |
| 14701 | aaagatacca aaagaaaagc aaattaaacc caaatcttga aaacattatg ttaaataaaa |
| 14761 | gaagccagac acaaaagacc acatactgta taacctcatt tacagtcagg catcgcttag |
| 14821 | tgataggagt acattctgaa aaatgcatca ttaagcgatt gtgtcattgt gtgaacatca |
| 14881 | tagagtgtac ttacacaaag ctagatggta tagccaacta cacacctagg ctacatggta |
| 14941 | tgacctactg ctcctaggcc acaaacgtgt acagaacgta actgtattca atgctgtagg |
| 15001 | caatcatagt acaatggtaa gtatttgtgt atctaaacat agaaaagata cagtaaatac |
| 15061 | aatattataa tcttatggga ccactgttgt atatccaagt ggtcgttgac caaaacggtg |
| 15121 | ttatgtggtg catgaatgta tacgaaatgc tcagaacagg caaatccata cagagaggag |
| 15181 | atttgtggtt gtcaagggct gtggggaggg agaatgggga gtgactgctc acgggtatgg |
| 15241 | agtctccttc cagggtgatg aaaatattct ggaattaggt agtggtgatg ggtgtacaac |
| 15301 | cttgggaata tactaaaaac gactgaactg tgcactttag aaggatgaat gttatggaat |
| 15361 | gtgaattata tttcaataaa taaaaatcaa acacccccca ccaaattaaa cccaaggaca |
| 15421 | gtataaaagg aaggaaatag aaaatagaca acagagaaat ttaacaaagc caaaagttgg |
| 15481 | ttcttcaaaa aaaattaata aaatagataa accctagcaa gacttatcaa aaataaaaag |
| 15541 | caagaaaaca caaattacca atatcaggaa taaaagaggg aatatcatta catttaaagg |
| 15601 | aaaatatggg aatattacca ataacttacc tcaataaatt ctacaactca gatgaaatga |
| 15661 | ataaatcttt tgaaaaacaa cttaccaaaa ctgacagaaa aagaaatgga aaatccaaag |
| 15721 | agcctccata tctattaaag aaattgaatt tgtaataaca atgatgatga tgacaataaa |
| 15781 | cttccttcca caaagaaaac ttcagatcta gatgatttca ctgctgtatt gtagaaaaca |
| 15841 | ttcttttttt ctttttttga gatggagtct cgcactgtca cccaggctgg agtgcagtgg |
| 15901 | cgcgatctca gctcactgca acctctgtct ccccagttca agtgattctc ctgcctcagc |
| 15961 | ctcccgagta gagcagctga gactacacgc aggtgccacc acgcccggct aatttttgta |
| 16021 | tttttagtag agacagggtt tcaccatgtt ggccaggctg gtcttgaact cctgacctca |
| 16081 | agtgatctgc ccatatcggc ctctcaaagt gctgggatta caggtgtaag ccaccacacc |
| 16141 | cggcctgtag aaaacattga aaggaaaacg taataacaat cttacacaaa ctctttcaga |
| 16201 | aaatagagaa ggaagagcac atctcaattc attttttatt atcaaaacct gacaaagacc |
| 16261 | ttacacaaaa agaaaattac agcccaatat ctctcatgaa cacagatgta aaaatcctta |
| 16321 | acaaaatatt agccaactga atagcaatat atgaaaagaa taacacatca tgacaagtga |
| 16381 | gtattatccc aggaatgcaa tgttaattta aaagtagaaa atcaaaatat tttaccatat |
| 16441 | taacacagta aaggaaaaaa ttcatgatta tatcaataga tgcagaaaat gcatttgaca |
| 16501 | aaattcaaca cccattcatg ataataacta tcagcaaact accaataaaa ggagcttcct |
| 16561 | caatctgata aaaatcatcc agctaacatt atacttaatt cagaaatatt gaacattaag |
| 16621 | atcatgagtc aggcaaagtt ttctactctc accacttctg ttcaacactg tgctagaatt |
| 16681 | ctagccagta caaggtggca aggtaaaaac aactcctaca gattggaaag gaagaagtaa |
| 16741 | aactatcttt attcacagaa aacctgattg gttatgtaga aaatcctaag gaatctatta |
| 16801 | aaaagctact acaattaatg aatgaattta gcaagttttc aggatatatg attaatacac |
| 16861 | aagaaaataa attttaccaa agacaggaaa gacttccacc ctaaaaacaa aacaacacaa |
| 16921 | aatgctgaga gaaataaaaa aaaaaaaaaa ccaaacatgt agaaaataga ttatgtttat |
| 16981 | ggactgaaga ttcataattg ttaagatgac aattctccac aaaatgatct atagactgaa |
| 17041 | tgcaatccta ataaaaatca caacaaacta ttttgtagaa attgaaaact actttaaaat |
| 17101 | ttatgtggac atgcaaatga tctagaatag ctaaagcagc cttgaaaatg gagaagagaa |
| 17161 | ttggagggtt cacaccacag ctgacccctg aacaacatgg gtccacttat atgtggattt |
| 17221 | tttttttttt tctttttgag acagagtttc actcttgttg cccaggctgg agtgcaatgg |
| 17281 | agcaatctca gctcactgca acctccacct cccgggttca agcgattctc ctttctcagc |
| 17341 | ctcccgagta gctgggatta caggcatgca ccatcactcc cagctaattt ttgtattttc |
| 17401 | agtagagacg aggtttcacc atgttggtca ggctggtctc gaactcctga cctcaagtga |
| 17461 | tccaccagcc tcggcctcct aaagtgctgg gattacaggc atgagccact tcgcctggcc |
| 17521 | atggtttctc ttccttatct tttttcctaa cattttcttt tctctagctt actttattgt |
| 17581 | aaaagtacag tacataatac atatacaaaa tatgtgttaa ttggctgttt atgttatcat |
| 17641 | taaggcttct ggttaacagt agtctattag tagctaagtt tttggggagt caaaatttat |
| 17701 | atgcagcttt tcaactatat gaggggctgg tacctctaat ccctgtgttg ttcaagggtc |
| 17761 | aactatattt aattataagt ctaactataa agttaaagga attaagaaag tgtggcattg |
| 17821 | gtctaagaat agacatatag accaatggag cagaatagtg tccagaaata aactctgtac |
| 17881 | atataaaatc aattgatttt caatcaaggt gttggatatc tagaactagg tatctatatg |
| 17941 | gagaaaaaat gaacttcaaa ctcctacctc ataccatcca caaaaattaa tgtaagatgg |
| 18001 | attatagaat taaacattaa aaacttataa gcttctagaa gaaaatatag aacatctttt |
| 18061 | tttgtattct tgggttaggc aaaggtttct taaagaaaaa ttttaaaaga ctaaacataa |
| 18121 | gaaataaatt tcactaaaaa cttgcatttc ttaaaaattg gaaactctct ttggctagtc |
| 18181 | acagagtaaa aaaaattgaa aactcctatt cataaaaaaa tcacatttaa gaaggcaaga |
| 18241 | gaaggcaagt cacacacagg aagaaaatat tcacatttat ctgacaaagg acttgtagcc |
| 18301 | agaatatata aagaatccct ataagtcaat aataataaga caaattatga aattttttat |
| 18361 | gtaggcaaaa gacttgaaga gacactccat agaataagat agacgtatgg ccaataaaca |
| 18421 | tgtgaaaatg tgatcaacat cctgagtcat tagagaaatg aagatcaaaa ttacaaagag |
| 18481 | atattatttc acatgctcta aaatagctaa aatgtaaaag tctgacagta atcaaatgtt |
| 18541 | gatgaggatg gaacaactga aatttttttt acattgctga taagagtgtg aaatgatgca |
| 18601 | atccccttag aaaactattt ggcgatttct ttcttttctt ttcttttttt ttttttttgg |
| 18661 | gatggcatct cgttctgtca cccaggctgg agtgcagtgg tgtgatcttg gttcaatgca |
| 18721 | acctttgcct cccgggttca agcgattctc ctgcttcagc ctcccgagta gctgggacta |
| 18781 | caggttcgca ccaccacgcc tggctaattt tttttttgta tttttagtag agacagggtt |
| 18841 | tcaccgtgtt agccatgatg gtctccatct cctgacctca tgatctgcct gcctcagcct |
| 18901 | cccaaagtgc tgggattaca ggcatgagcc attgcgcccg gccagcaatt tcttataaag |
| 18961 | ctaagggtac ctatcctgtg acataaccat tctgttctta ggaatttcct caagagaaat |
| 19021 | aaaattatat tttcagaaaa agactcacat gaatgtttac agcaactttg ctcatatagc |
| 19081 | ccaaccctag aagcacccaa aagtttatca tcaacagaga aatggaccaa gaagttgtgg |
| 19141 | tataggcatg caacgggcta ttactctaca ataaaaatca atacattact tatatatgca |
| 19201 | acaacatgga tgaatcacaa aaacattacc ttgaccaaaa gaagccagac acacaaaaag |
| 19261 | tacattctgt aggatacctt ttatatgaag tttaaaacag gcaaactgat ctttggtgct |
| 19321 | agaaatcaga gcactggtta ctaagggact agaaatcgac tggaaaggga catgagagaa |
| 19381 | catgtggaac aaatggaaat gttctatgtc ttgattgtgt ggcggtatac agggaaatgc |
| 19441 | atttattgaa actcattgaa ttttacactt aagatccatg aatgtaagtt tcacctagtt |
| 19501 | ttaaaaaaag aagagagact cacatctaaa atacctaaaa cttgaaaaat attatataag |
| 19561 | atgaggaaaa aaattatttc tgattccatg ctactaaaaa taagctacaa atgtgattca |
| 19621 | taatagaaga agccattttt atatttagca cataacttaa aggtctaaag gacaagcaag |
| 19681 | ctgggcgcag tggcccacgc ctataatcct agcattttgg gaggccaagg caggaggatc |
| 19741 | acttaaagtc aggaatttga gaacagcttg gccacatgct ggtgaaaccc tgtctctcta |
| 19801 | aaaatacaaa aaaagttagc caggcatggt ggcacacgcc tgtaattcca gctacttagg |
| 19861 | aggctaatgc aggagagtca cttgaaccca ggaggtggag gttgcagtga gcggagatta |
| 19921 | cgccactgca ctccagcctg ggtgacagat caagactccg tctcaaaaaa ataaattcaa |
| 19981 | aacaaaatag aatgaaggag aaacaagact atttagtaga ctgagaatag ctgtttctta |
| 20041 | ttgagggata aactgcacca aatgctattg taagcattat tatttccttc attttaaggg |
| 20101 | tgaggaaaca agggcaaaga gaagttaatt agcttcatcc agggcacgca aactaggaag |
| 20161 | aggcagctgg gatttgaact cagggactct ggcccaagag ccttaacctc tatcccatgc |
| 20221 | cccctcgtgc ttgtaaagga cttgatgctt tacttagact ttcccacaac agtttcttgt |
| 20281 | catcctcgtg atggtcccag gacacaggct ggtccaggat aatgaccccc ggctaacaga |
| 20341 | tggtgagtct gagaccccaa ggggttggat ggccagctcc caggcctcca gaccatgggc |
| 20401 | cgttgtgccg ggccgcacac ctgagtgggc ctggcttttt cctgcacgca ggggtgcttg |
| 20461 | ggccctgctt cctggtgctc catgggagta tctggccttc aaaaggaaca gatcgatctg |
| 20521 | aagtggggag agagaaaata cagcaggacc atcactcaga gagtcgctgt agaggaagag |
| 20581 | agggagagga gacgccagga catgggagct ttgtgggagg gaatgggact atttgctgag |
| 20641 | ctttgtacag cccagcccag gcagtgcata caacaaggct ttgctgattt taaataacac |
| 20701 | aaggaaatag cagccccagg tctgagtcac cagcagagtt ttactctatt tctcagctca |
| 20761 | cacagggaca atagcaatgg caggcactgc tgggagatag gctagtgggc tgggccctgg |
| 20821 | caaaatcacg acgtccttga aaacagtccc aggaccttct ccttcccctt cggatggccc |
| 20881 | accacctcac cctctgccct ttcgggaccc cagcccctct ccagtcttgc ttccacaggc |
| 20941 | tgctccctga gggcagacca ttcttgcttt tcccttcacc atcgggactc ccctgtcctg |
| 21001 | tgtccagctc cttggaggct ctactctctg ctctacgctt tcaaacattt ccttacactg |
| 21061 | ttctctctgc ctggatttcc ctccttctcc ttgcttccca gtctctctga atatccagat |
| 21121 | ttcttctggt cttctagcgt caatgcgtgt gcctctgcaa tgcctcctta atccactaca |
| 21181 | ttgagagtca ttgctccttt tcctgtgttc tcactttatt tacacttttt gcatgccaat |
| 21241 | gacaaaattc tgccttgtat catcggcaga attttccatg tctgatatat ctccctctgg |
| 21301 | attgtaatac gctcttaaag gcatcgttca gattcgaatg atcttagtac aactcccctc |
| 21361 | tgtgaaggcc aaatggcaca caagccagga gctagaaagc cctggttgcc tgtggaaatg |
| 21421 | aatgaacaca catgggctgg cagccgtgtc cctgcacacc tgccttttct cagaggtgtg |
| 21481 | gccctagcag ggtaagctgt ctggaagagg gagctatttt gtgcagatgg aacattttgt |
| 21541 | ccccttaaat catgtcccat gaaaggccag catggcatcc tgcttctgaa acaagcactg |
| 21601 | agctcgtctc catttggaga agatctgtcg tgtgggtatt tttaaatggt gaaaggagaa |
| 21661 | atgggtatat ctgataccat ggcacttgtt acactttaag cacagactct gttattcata |
| 21721 | ctccatctat tgactcaggg aggagtttat ttcaaaccaa acagctcagc tatcccagga |
| 21781 | gcagctgcct cagaaggaag gaggatgctg ttctatttcc cccatcgaac ctccttctca |
| 21841 | ctcgatccac aacagccttt ccatgcaagg aagaggctat tttctttcaa gctttattct |
| 21901 | ccattttccc tgtggcaaga aaggtgattg gatattggga tttgtaatgg ttttatctga |
| 21961 | aagccattta aaatgaagct ggaatgtcaa caagactgac gctgaatgga gtagatgtga |
| 22021 | agtggaaatg aacttgaaac aagagatggg gttagtcatc cccctgatca cttggaacag |
| 22081 | atgatggagg tcccctgcct ctgctccagt gaacagaaca gaaccacttg aatactgcca |
| 22141 | gccactgttt gtacataccc tcctgaaacg gctcttccaa aatgctgaag gacattttgt |
| 22201 | tttcttaata atttggcctt tccactgttt ctgtatgatt gatgtgtttc agcaaacctt |
| 22261 | ttttaaaaaa gaatatctac aggtaaattt agctcatcat gtttgagaat attcaccatc |
| 22321 | tctaaatccc cagggcctaa atcaatgagg ttttagcaca ttttgaaaca gaaccctgat |
| 22381 | gtataaattc tgcaatggct gatttcacgt attttacttc ctctctaaca aagctatgga |
| 22441 | aaaatgcaca agcaggggag ggtttgatcc tcggtgtttc ctgcagatgt gaatctgaca |
| 22501 | ccaccttgga gcagggcccc tccccacctt ctcccaatcc tccgctgggt tgctgcattt |
| 22561 | ttcactccaa gagaccccgg aggacagcta tatccgaggc ttattaaaat cttctaggat |
| 22621 | gcaaaggcct ttggttattc agagcagcag gtctttaggg gaagccccca tacacaaaca |
| 22681 | tgctcagctg attctcaatt tatattgtgt gttacctgcg gggaaaatta aaagctcaaa |
| 22741 | cctcaggcac tttccctctc ctcccttgat tgcccggggg cttgttgttg agatatttct |
| 22801 | tgttgatttt tttgtttttt atgtctctgg ctggtgctaa acattctttc tttcccatca |
| 22861 | tgtttacttc acatctcttt gccgtataga tagcttctgc tttatggttt tttcctcctt |
| 22921 | atctcagatg cagccagccc ttccccacct gcccccgccc caaaacacac acacgaacac |
| 22981 | acaccctttc agactgcatc cacactctct gtttcagtgg atctgacatc aacgaccccg |
| 23041 | ccacccccgg ccctcgtcag aggggagctc tgcattgaac taggactagc tcctgggtca |
| 23101 | taaaagttgc taggaccctg gagagctctt actaaacaga tgaggccacc actgacagag |
| 23161 | gagagaggtc agttcccgga gggaacgagc ctgctttgct gagccccctt ccttgcccag |
| 23221 | cccccagacc catcacaggg aaggttcaga ggagctctga cccctccagt acctccttgg |
| 23281 | cctgacgccg ctctagcccg ggctcccagg ttttctgtag ggagaggagc acagtccgct |
| 23341 | ccacccatgc catgggcttc atcagtgaca acccaaactc acccccaaat aggaatggct |
| 23401 | tcaacctgga gacagccctt caatgaaatg gtttatgctg gtggagattt aaaggtattc |
| 23461 | gtctttcggc tgggcgcggt gactcacacc tataatccca gcactttggg aggccgaggt |
| 23521 | gggagatcac ttgaggccag gaattcgaga ccagcctgac caacatgcga aaccccatct |
| 23581 | ctactaaaag taaaaaaatt agctaggcac agtggcgcat gcctgtaatc ccaactactt |
| 23641 | gggaggctga ggcacgagaa tcatttgaac cccggaggca gagtttgcag tgagccaaga |
| 23701 | ttacactact gcactccagc ctgggtgaca gagcaagact ctgtctcaag acaaacaaaa |
| 23761 | agggtgtttg tctttcaatt gcaaaaatca agcatggtca ctgaaaaaaa attcaaattc |
| 23821 | acatttcatt ttgttttgtt ttgttttgtt tgtctttcag ccaggtgcag tggctcacat |
| 23881 | caaagtatgc tgctttcaat atcttctcac tctccctccc cagggataac cactttcttt |
| 23941 | tttattttat ttatttaact tttttgagat ggagtttcac tagttgccca ggctggagtg |
| 24001 | caatggcgca atctcggccc accacaacct ccgcctcctg ggttcaagcg attctcctgc |
| 24061 | ctcggcctct tgagtagctg ggattacagg catgtgccac cacacccagc tatttttgta |
| 24121 | tttttagtag agacggggtt tctccatgtt ggtcaagcag gtctcgaact cccgacctca |
| 24181 | ggtgatccgc ccgcctcggc ctcccaaatt gctgggatta caggcgtgag ccactgcgcc |
| 24241 | caggggggta accactttca gtggtttgag atgtttgtct cttcatagaa gaaatatatg |
| 24301 | catatagttt gggttttggt atttttttta attaatggag ttctaatata catgctgcct |
| 24361 | tttttccctt accatggaat tgacacagga taataaatta attctaagca acaaattttt |
| 24421 | ctttaaccca tcctgtctct aggtttctcc tcacagaaat tacaacccct tctcttgtgg |
| 24481 | ttccatccca tccctaaaac agtatttatc ctcccttctc tgtaccatta ctgtttcttg |
| 24541 | tgcgaaattg taccttggag tatgtactga atggtgttgt actggaggcc tggcgcggtg |
| 24601 | actcatgcct gtaatcccag cactttggga gaccaaggtg ggcgggtcat ttgaggtcaa |
| 24661 | gagttccaga cgagcctggc caacatggtg aaaccccgtc tctactaaaa atacaaaaat |
| 24721 | tagctgggca tggtggcggc gcctgtaatc ccagttactc aggaggctga ggcaggagaa |
| 24781 | tcgcttgaac ccaggaggcg gaggttgcag tgagccgaga tcgtgccact gcaatccagc |
| 24841 | ctgggaacag agcaagactg catctcaaaa aaaaaaaaaa aatggtgttt cccttgcact |
| 24901 | ggtgccctgt tggctcctgg cctcccttct agaccatcag ctacctgtgg gtgggagcct |
| 24961 | gtgcctttgt cattggtcca tcctctatcc cgaggccccg ggacatggcc tagaacatca |
| 25021 | gagactccag cggctgtttc tcaaagtgaa ctgaactagc tggtgtttcc cacacgatgg |
| 25081 | agccccctcg acctgccctc gattctctcc tgacttattt ctccccacat cttgggccag |
| 25141 | ttccagctgg actagcaaag agggcagctt tacctctgtg ctcccaacat gccctagtgg |
| 25201 | gtggcgtatg gatgggggag cctgggacaa tgtgtgtcca tctcacacac tctctacttc |
| 25261 | ccatgccagt ggggaaagtg ggggcaggaa tagagcccgg gagggaactg ccagagactg |
| 25321 | tcttctctgc taaggctgac aggaagacgg acaaccatga cagtggtgga aggggaaggc |
| 25381 | ccttggccca cggggaatgg ctgtctggaa gctgacttgt tgttgggggc ctggtttggg |
| 25441 | caggaacccc tggggtggct gcagaaggag gctgggcttc acagacccct gtcggcaggc |
| 25501 | aggggctacg ccccctatac taggcttctg ctcagggcag cagggcccgg agccaccagc |
| 25561 | agagctgagg aggctgcaga ggaggctgag agatccatgg aggaagaaca tggtggaaaa |
| 25621 | gagtgcctga ggtccgcttc cacggccact ctgaccagcc tgggccttct gtgccttagc |
| 25681 | attcccgttc ctaacatgga actcatggcc tttgacccgc ttccctcacg aggctgctga |
| 25741 | gagggtcaga gaagaagccg catggggact ggcctcaccc tgggagaggt gagcaagcca |
| 25801 | cgaggtccca tgttgcatga aaagtcaaat gctgttagga cgactcccag gatgaggagg |
| 25861 | tctgacccca tgctcatcgt ctggacagct ctgaccctag aatttatttc ctctttcccc |
| 25921 | acagggcaat ccttctactc tcgggtcctg gagaactgtg aggatgtggc tgactttgat |
| 25981 | gaggtaggag gcccaagact cccccctccc tcagccctga gcccagaggg gaacagccac |
| 26041 | ccttcgctgc ctcttgcggg cacacactgg ccccaaatcc caggcactgg cctgctctga |
| 26101 | gcccctcacc tctcagctgc ttcctgaagg aggtggtaag gagggtgtgc aggaactccc |
| 26161 | tcccccatgt tccccccaga aacctctgca caggtgaggc ccgtgtgcaa atgacacggg |
| 26221 | gaacagcagc ctcgcccacc tcgacggccc tgctgggtct gggcctgtta ttccctgtgg |
| 26281 | agaaagagcc cacaggtgct gtagacctga atgtgagcca ccagctgagg gcccaacgag |
| 26341 | gcaggcgagt gttggggacg tcgcaaaggc cagtctgtgt cagtccccag gggttgaaga |
| 26401 | gcagggcagc cccgggcact gaggtaggag ccccagtcac cagggaaaca ttgtcaagca |
| 26461 | ccccacctga gtgagggcgc catctccaga ccttgagggg aagcataggg aacagaagac |
| 26521 | agtctggatt ttcagaaaca gctctggggg ttccatgaga aaagacgtga gctgctggtc |
| 26581 | tattgacaac gatttttctc aatcctcact ccagctgggc tgttgtcaca attttatcag |
| 26641 | caaaggagca ggcgacacca tcccacaggg gtgcccagga gcagtgagag gacttacaac |
| 26701 | gcttccctct ccctgccctt cccctcggta cctggccggg ctgggagccc tatcctcaca |
| 26761 | cacacacacc agctcgagca gcctgcggcc tcctccgcct cctcacattc tttcgtctat |
| 26821 | gtgtttgctg cttccagaat ctatattccc ctctggctgc tgtaggttct ccagggatga |
| 26881 | ctttggagtg agggccagca gtcatccgtc accatcttag cacaaactgg aagccatgta |
| 26941 | gtgaccctca aatagtgtac cccctctctc ctggggttgg ctctcccgct tggctctgtg |
| 27001 | ggggctggga agggcctcat agcagactgt gcctcttgag gttggctgct ggcgttcggc |
| 27061 | tgagcagcca ccaggctgac acttggcacc agctgtctcc ccctcctcca gaaaccaggc |
| 27121 | cacacgatgt ggctgtgtcc atcgacccag agctggagac acagggagca aaacctcgct |
| 27181 | cctcactcag gcttaggcac agccatcaac catcgcggcc cagcaccaca ccctccccaa |
| 27241 | ccacttcagg gcgcagttgc cacgacctcc ctggtacgtc cccactgcta tgcaggacag |
| 27301 | gtgaatcact catttaaagt gaatcactag agctaaggaa gtttctgtcc ttaccttctc |
| 27361 | cccctcctgg ctgtacaatg acctcagttt ctaaacctgc caccatcttt gtcaaatggg |
| 27421 | gttggtgatg ggtgtgaagg tctctgtgaa atgatgaaca aaatgaaggg ttatggtgag |
| 27481 | agtggaatca tggctgccca ctgagacagc tgtcatagat gcttcaggct tgccccatta |
| 27541 | cacacccggc ctgctccctc ccctccccat ttcctcagtc agggcactgg gctggctggg |
| 27601 | agaagatgcc agcagcctgg cccagtttcc catagtccta cctccctggg cttctgccca |
| 27661 | ctaatccacc aggcacagca tctgactccc tcctcccaag actcccaggg gatatgtcag |
| 27721 | cccaggcgtt cagccagggg gcaacctgat gccccttcca agggcactgc cacccttttc |
| 27781 | catgcccagc gccttggaca cctgagccac aggtatgcac gacattcaaa gttaatcacc |
| 27841 | atgtcgttcc tcttcccaac tccgcccagc ctgcctcagg gggagagtct gtctctgctg |
| 27901 | gccctgaaca aggggccaca ttccgagcat ctagtgcatg ccaggccggg cttgagatat |
| 27961 | cccagaggca ggaacctggg ctcaacaccc catgatgatt tgtatgggag cttagggatg |
| 28021 | gggtagccag agtcagtgtg gagagactgg ggcagggcag aagcagttat ggaagaagca |
| 28081 | catgactagg gtcagagagc agggcacgcg atggggagaa gaggctcctg cccggggaaa |
| 28141 | gtgctgcccg cccactgggg agacagggaa gtttctggtt gttgcaatga ggagcctact |
| 28201 | ggcatttagt ggggtgggga gcaaggatgc agaatgactt gcaatgctca ggccatcccg |
| 28261 | cacttcccac ctgggagccc cgtgggaaga tggtggcagc cccagcagca gcactgagct |
| 28321 | gcttcccgag ccatgcccct tccactcaat ctccgaaatc atccacagac gaaattaggc |
| 28381 | tcagatggta actacccttc cccaggtgac agagctggaa gcggccaagc cagggttctg |
| 28441 | aattcatgca tagattagac ctaagccctc tctggataca gtgatagggc ctgactccca |
| 28501 | ccacccctgc aaggcccgtg ttggagtctc tccacacccc ctgcctccat ttctccctgg |
| 28561 | gcaaagtggc ctcagccctg gccaccaatg gtcagcagtg cacatcccac aaagcaggaa |
| 28621 | ggccaccctc ccattccctg ttcaggaacg gcccggaggc ctgggtcagc ccagtcccaa |
| 28681 | aggtagcctg gagccatacc ctggctttaa cctttctccc tagacccagt ggacaagttg |
| 28741 | taaacttccc tggcttcccc ctgaaagaat ctgcctgcca gtggttccag aatatcctgg |
| 28801 | gaaagagccc tttcaaatcc ccctgaacct tcttgacttt ccagaaagcc tcttctctcc |
| 28861 | gtcttactct gcccagggcc tgccggagcc agcttagtga gacacactgg cctgggagtc |
| 28921 | atgagaccta caccacagtc cttgctgagg aacctctttg ggctttggat tccccttctg |
| 28981 | taaaagagag atatgctccc tgctctatct gccccacggg actgtcacaa ggctaaaaaa |
| 29041 | agatgaaatg agagacaaga aagcaaatgt ctctcacagc tctactaggt aaggggttcc |
| 29101 | aagcaaggga ggggcccctc ctctgctcag gcatgggtga gaggggctgc agcagctggg |
| 29161 | cttaggaacc tgagtgggga ggaggatgcc atggaagaaa gacaatgctc tctacaacaa |
| 29221 | tgggtggaaa cagagcctgg acatggtgtc tcctttccca gaggctggaa cctgagcccc |
| 29281 | tacatttaac ctacaactct ggaaaagcta gggagagaca gagaaagacc cagcctttgt |
| 29341 | gacctgggga aacaggagta gccaccttta gccagtttgg tttggctcta acacaggccc |
| 29401 | tgtgtggagc aggccccagg ggagaggcca gagtaacaat agtacttgtg ccaatgataa |
| 29461 | gaagaactgc tgctatttac tgagcactta gtgtgtggca agatgggctg agagcttgac |
| 29521 | acaagcatta gactcactag aacttgctgg attggtagca tcctaggtga taaggagcca |
| 29581 | caacaggatt taaacccgag tctatctgat tccaggacct atggtcattt gtaaagtaga |
| 29641 | caagactcag ccctgccctc aaggggctca gtctagcggg cagatggacc cactacaaac |
| 29701 | aaggagggac cctgggcctt ctgagccaag aggaagaaga ggtctccagc ctgggggatg |
| 29761 | acagggcagg ggagtttggc cttatctgcc cctttctgct tgtaccagga agtcatggct |
| 29821 | gttacctcct ggaggccaga aacgcacctg tcttgttcgt cattggcctg gcacccagca |
| 29881 | tggagttgag aaaatgttgc cgagtgaaag aatgaaaaaa acagtgacgt tcactaggac |
| 29941 | tggcacctgt caccgcaggc ctgtgcccag accgagtggg ctcagcaggg ctagtggtac |
| 30001 | atcaagccct ttgctgtggc ctggatagaa aggaagcagg caaggcacag atgagatcac |
| 30061 | ctaaagggac tttagatcac cttgatctct aaggttagag atcatctagt ttaaccctct |
| 30121 | tgtcttgcag ttgaagaaac aggtcttaga gtggggaaga gaattgccca agaagaccag |
| 30181 | ctgagatctg agatcctaca tttaacttac aactctaaag aagctgggga aagagacaga |
| 30241 | gacaaagaca gaaacagaga gagagagaca gagacacaga gacccagcct ttgtgccctg |
| 30301 | ggaaagtgaa atagccacac tcgggatact gagcccaggc ctttaagctt gcaaatccgt |
| 30361 | ctctttccat tgtactctaa agcagcagtc cccaaccttt ttggcaccag gggctggttt |
| 30421 | cgtggaagac agtttttcca cagactggga tggtggtggc tgggggttat ttgggatgaa |
| 30481 | actgttcctc ctcagaacat caggcattag attctcttaa ggagtgcaca gcctagatct |
| 30541 | cttgcatatg ttgttcacag tagggttcac actcctatga gaatctaatg ctgtcactga |
| 30601 | tctgacatta gatggagctt aggcgggaat gctcgctcac ccgcggctca cctcttgctg |
| 30661 | tgtggctctg ctcctaacag gccatggact ggtactggtc tgtggcccgg gatatgggga |
| 30721 | cccctgctct aaagctttgt agtgcatctc aatattttcc cccaaaccta tagccctgtc |
| 30781 | cctttaagga tgctaccttg ctgatttagg atggttccag gcccactcag cggccaagct |
| 30841 | ggacataatc cagatcattc tccaaggtac atcagggaaa ccttttttgc agagtcctag |
| 30901 | atcactgggg ctgataggat gcagaaccct gtgccccggc cagcaccagc caggtcaggg |
| 30961 | ctaagcctag accaggaaac tgggtcagga ctcagcactc cccgggctcc tgagatcact |
| 31021 | ccctccaaca gaggccctct ttccctccct atctgtacta cctaccacct tgcttctgtc |
| 31081 | aacagtccta tcccaggctg ctattccagg tctgtgtctg tctccagaac tatccaggac |
| 31141 | catccccagg actgagaaac aaccctgcat ccctgcgttc tgcacagcgt catgcacaga |
| 31201 | gcctggcaca cagcaagtgc tcagcaaatg ttcgccccca gcatggggct tgctggctcg |
| 31261 | tgacatcttg agtgactgtg tttggcttaa ctgctacttg agtcccccag cagtaccagg |
| 31321 | cttcaggaga ggattcagtg tagtggatta agccctgagg actgaactcc agactaagca |
| 31381 | tcctgagact tgagtttgaa tcctgcctct gccaccaacc agccttgtgc ccgcgggcaa |
| 31441 | ctctcgcctc tccactttcc cacttgtaaa aggagcacat ctttgccatg ttgctgtgag |
| 31501 | cttggttatg ggtaaatgtg ctctggaagt actaagtcct acccagatga aattcttcct |
| 31561 | tcagaagccc ttttccttca gtcttttttt tttttttttt ttttttgagg tggagtctta |
| 31621 | ctctgtcacc caggctggag tgcaatggtg ccatctgggc tcactgcaac ctctgcctcc |
| 31681 | caggttcaag cgattctcct gcctcagcct cccaagtagc tgagattaca ggcatgcacc |
| 31741 | accacacctg gctaattttt gtattttagt agagaccgtg tttcaccatg ttggccaggc |
| 31801 | tggtatcaaa ctcctaacct caaatcatct gcccactttg gcctcccaaa atgctgtgtt |
| 31861 | tgcaggtatg agccactgcc cccagccccc tttccttcaa tctaatagct cacaagttca |
| 31921 | ataccatagt caggagagga gtgtagctcc caaaccctca aaatcctcat ctcgtcttgc |
| 31981 | tgtgttctca gcatatcacc ccaaatggag gaaaggacat aaccacaaaa atgaggagac |
| 32041 | aatgaaaaat gaaattaggg aagagaagat gcagtgaaag agacacgtga aatccacagg |
| 32101 | ccgaggcaga agaggaaagt gatggcggcg aaggggaggg aggtggcatg acaaggagac |
| 32161 | aaggcagttg cagacctgca cagagttccc actgggaaga tctaaactaa acacattctg |
| 32221 | ccgtgctgtg tcacttacga ctgctgtcac ctgtgagatc ccatttgatt ctctcaatag |
| 32281 | ccctctaagg tagatattgt cacccccctc ttttcacaga tggggaagct gaggcacagc |
| 32341 | tagtgagtgg cagagccagg gctagaactc aagtctcctg actcaaactc agagtttctg |
| 32401 | caacaccacg gagactccca gtctgcgtga gatacaagcc tcggtgttgt cagaagaaca |
| 32461 | aaaaagaagc aaagggtggg catgtccttt ggagctctgt gaggtgccca gagctcacag |
| 32521 | aggctgcctc agcaaaggaa ggtgtcagca atgggagatg gggctggaaa tgctgtctgg |
| 32581 | gcacagcaag ggggcctctg ggtgctagga aggggaatcc ccacctcttt cagggagctg |
| 32641 | tagaggagcc actgaaaagt tttaacaaag gagagataaa aagagaggaa aattcaaccc |
| 32701 | caaaagtctc cttcttacag cccatgcctc tacttccagg gaggccaaat gggagtaacc |
| 32761 | cccagtccca gaccctgagt cacttccctc cagccaagag gcccgtcacc ctccgaggcc |
| 32821 | ccacactgat gccaggaccc cacctagagg tgccggcttg atcggtctcc aggctgggcc |
| 32881 | ttgggatttt taaaagcttc tggaatggat tgcagttcca gccaagatga agaacccctg |
| 32941 | agaaagacag agggagacag agacaaaggg agagatagag acagagagag aaactgatga |
| 33001 | aagaaaacag atgtggtgag gagaagaaag cagacgaatg atgcgggagg gaaggaaaag |
| 33061 | aaatgagggg aaagcctcgt gtgggtggaa aatgcgggag ggagacaggg gaggaaagaa |
| 33121 | aggaaactgt aaggtgggag caagtcagag accgaagaag ctgctgtgac tcagtgagga |
| 33181 | ccctgtcttc tccctcaccc ggaaagcctc caagaagaac attccccgct gacataggca |
| 33241 | tggactgccc agacccggct gacgaatttc tgaaagggca cctgagccac acacctacac |
| 33301 | acgcttcccc tgattattct catctgcagt caggggcccc ggaagccccc tgtctcctgt |
| 33361 | gccctccctg tcccccgact ctcactcaac aaactggccc tcgccccgca gccaggcagc |
| 33421 | ctccctcccc aggtccctta gcctcagcct cccgccaccg ttcaacaccc cacctccctt |
| 33481 | tcacagggcc atctccaaag tcatgtcctt tttctcctga tctttctctc cttccaatgc |
| 33541 | caaaatccca cccacagacc ctcaggggga ccaatcaccc ctcccctctt catccccagt |
| 33601 | aaaccaaatc tcggtggctc ctgcggcccc ccgactccca cacagcgccc tggctgatga |
| 33661 | gctgggcctt cctgggctgc tttatttccc tgcagcccca taaaagcagc ttcattaaga |
| 33721 | aaaccacaca ctctgctgag ctgccagagg catccagaag ctggagccgc agccgctgaa |
| 33781 | tgaggcctgt gggccgggct gcctccactt cctgggactc tcagcgcacc cctccgccct |
| 33841 | gtgcccacct cgcctctgaa gccctcccta ggccctgctc agaaccctcc ccaccccacc |
| 33901 | ccgcagaccc ctctcccgct cctctgcttc ttcctccctc tcatgccaag gccaggtcct |
| 33961 | cccttgccag tcctgaaggg agatgtcaca aaggccgttt tcctgagaca ggccctgccc |
| 34021 | acactgggca gtgacccgcg gtgctggccc agtgtgccca agccctccaa gtccccaggc |
| 34081 | tgggagaagg aatctcagct ttgggaatgg caaacgtgca gggtgggctc acagaagcct |
| 34141 | cctcccgagg gcctgctcag ccagcaacag agtgctccaa gtcatgcatc tgctctgagg |
| 34201 | ccgagttcct tgtttataga gcacagaagc cattacccac ctctccggcc attggaaaga |
| 34261 | ctaaatgaat gaatatgcac gtagagcatt cagacctctg cataagaaaa agttccccag |
| 34321 | aaatggcagc gattattact attattattt attactggac tattgagcag tctgaatttg |
| 34381 | gtagggtata aaaatggaac taaaaaataa aaagtcactg ccttctacca gatctgtcaa |
| 34441 | aatcctccct gacacggtct ctccacagcg tcttgagcag acctcagcgt tgtctggtcc |
| 34501 | tgtccagaag ggcttcctac tccagtctgg catcctgttc acccctggcc atcctccttc |
| 34561 | cctcatgctt gtggctcagg atgtggagtg ggacagggac ccctgctgag gccctccaca |
| 34621 | tcctcccctg gtgggcagcc catggaaaaa ctgtcctcat atcactctac cccacttggc |
| 34681 | caatggagcg caaatagatg acttgccaca gccaacagtg gcaggctggg ctccttgccc |
| 34741 | tgctgtactc tatgggtctc ctgccagtcc actgccctgc agatgccact ggggatttgc |
| 34801 | atgccatgct gcccctcttg caggtatcta atcaccatga gctgtttccc caagaagtac |
| 34861 | cacaaaaaca ctacgcctag gacagaattc ttcccacctt tcccttgccc agtcttcttt |
| 34921 | cccatcccag gaaggtgggc tgggtgatgg ttggaggtaa cagggccttt gaggaagccc |
| 34981 | taggaagatg tctggctctg cccattggca gctttttaca gaatggggca ctgggccact |
| 35041 | ttagcctctg ttttgagcca ttgttgccac ttctagggca ccaggaaaaa tcccaatcaa |
| 35101 | attcctactc atcattaaca ttgagttagg gaggaagcaa cgaagaagtg gtaagggtga |
| 35161 | atctagaaac aatgagttgg ggacaggctg tgggcctgac cccaataaca ctaatcagct |
| 35221 | caaacctgtc cccagtgtta ccactggcag agtgaggagt ggtttgaact caacacagga |
| 35281 | gtctggggca gagcctgtgc cagtcagggt gattctgatg agagagagct ggaagctcac |
| 35341 | agctccattc agcacccacc aaaaaccagg ctcacaccca cattccttgc tgtctccctg |
| 35401 | ggacccgacc accaccctgg ttgcaccacc ctctcccaac ccccctcagg agctgggagg |
| 35461 | ccatggaagc agcgctgtgt agggagtcaa aagtcctggt aggtccaggc tcttcaccta |
| 35521 | ccacatgacc ttgggcaggt cctccaacat ctctgagcac catctttgaa agaggagtgg |
| 35581 | gcaacaatgc cggctctaca aggtggttgt tggaactaaa tgagattcca ggtgtcaatg |
| 35641 | ctttgtccct ggggagcact gggcccaagt gaggggccac tctgactgtt ggagatcccc |
| 35701 | acaagagatt cccctcccac accccacggc tcctacctgt tattgccacc gaagccgcag |
| 35761 | ttgtccctct ctccccagac atttcggtgg ccggtggcca gcagcatcga cagaaatgag |
| 35821 | atgctggaga ttcaggtttt caactacagc aaagtcttca gcaacaagta agtgtgggat |
| 35881 | ggggcaggag gggctgggcc tggacgggct gggagcctgc tcttctcctt gggctaccct |
| 35941 | ctgtttgggg cttaaaaagg ggacctacac tcccaacctg ccctggattg atcttcaaag |
| 36001 | accgaagaaa tcttgggctg gtctttgatc cccattttga tccctcttct tgtcttcaga |
| 36061 | atcccccagt tctcccagct gctgtcagcc aagaacactc caccctccta tcacctctgc |
| 36121 | tgtctccaac cccatcaaag cttcctgtct taaagactta aagctttaag tctccctcaa |
| 36181 | tgccacgctg gggtacagtt acccactgga gaggcgaaag gtggaggggc tgatgatctc |
| 36241 | ctccaagaga cactctgtag ccctgagggc aggcttgaca gtttggggtg gtggtttagg |
| 36301 | agtcaggcaa gcctgatctc agacactcag gtcagtcatc tactgtgtga ccctggaaag |
| 36361 | gttacataac ctctctgatt tcaatgtgct catgtgtgaa aaggacaagt atttacctca |
| 36421 | aagggcagct gtgtgaatta aatgagatag atattcactc actcattcaa caaatgttta |
| 36481 | ctaagcgtcg attgtgtatc aggtactgaa ttaggtgatg cagagggcgg ggtgcctacc |
| 36541 | ttcatggagc ttgcactcca caagtgaagt acacctgcca tacgagcgtt atcactataa |
| 36601 | ggtgttcaat aaaagtagtt gtcatccttc tctctgggcc atgagaagaa ttcagaagga |
| 36661 | tttgaacacg ctggaacagt ggctaagtaa tatcttgggt taaaaaatca cagccaggtg |
| 36721 | tggcacacac ctgtagtcct aggtccttgg gcagataagg cgggaggatc atttgatccc |
| 36781 | agtaatttga ggctagcctg ggcaacatag tgagatccca tctctttaaa aaaaaatcgg |
| 36841 | ttgctcttat acaagctgga ggtcatggct taactgtaac atgtccaaga aggtatggag |
| 36901 | gtgttagctc actgaggact cagaatgact caacagtggg aggagactac aaacaaaaga |
| 36961 | aaagtaggcc tcatcctaaa tcatactaat agaattaaag cactcctgat ctgagcagga |
| 37021 | gagacaagga gtccactgct ctgatactag tggcagagaa ttcctgtagg caccacccta |
| 37081 | tagtttccag gaggaaaggg actttaagtg ttaccttata acaaatggat gagagcctga |
| 37141 | aagggaaaat catagaggac atattcatcc attcatccat ccattgatcc attcatccat |
| 37201 | ccatccatct atcattcctg ttattcatcc atctgcctat ccatttgtct gtccatcaat |
| 37261 | tgatttatcc acccttcctt tctttcatcc atccttccat cctttcatcc atccattcat |
| 37321 | caatccatcc ctccatccat ttatcaattc atttatccac ccatttatcc atctatccat |
| 37381 | tcatccgtcc atcctttcat tcatcctatc catccactca tccatccatc catccatcca |
| 37441 | ttcacccatc cttcctttca tccattcatt catcaaccca atccttccat ctttccatcc |
| 37501 | attcatccac cacttaccct ttcatccttt ccattcatcc ttccatccac tcatccatcc |
| 37561 | attcatccat ccttccacct tttttctttt cctttttttt tttttttttt ttgagacaga |
| 37621 | gtcttgctct gtggcccaca gtggagtgca gtggcctgat ctcggctcac tgcaacctcc |
| 37681 | gcctctctgg ttcaagcaat tatcctgtat cagcctcctg agtagctggg attagaggtg |
| 37741 | ctcaccaccg tgcccagcta atttttgtat ttttagtaga gatggggttt caccatgttg |
| 37801 | gccaggttgg tatcgaactc ctgacctcaa gtgatctacc ctcctcggcc tcccaaagtg |
| 37861 | ctgggattac aggcgtgagc caccactttt ggcccatcct tctatctttc cattcactga |
| 37921 | tccatctatc gatccatcca ttctttcatt ctttcatcca tccttccatc catcatcctt |
| 37981 | ccttccatcc attcatccat cctttcattc ttccatccat tcatccatcc atccatcttt |
| 38041 | tcacccaact ttgcagtcac tcatcataca tatagtgaac aaatgctttc tgccagtcag |
| 38101 | acactatgct agtcactgga gatactgaga tgaggtattg aggcacagtc cctgccccta |
| 38161 | ccctcccaga aggctttttg ccacaggaag aggaaagaaa ggtgtgtacc tagaggcagg |
| 38221 | atgaggaaca ggctgctgga agacagcaga caactgaaag atagccagta ttttccagcc |
| 38281 | aatgtgctgt cttaggaggt agtgagctcc ttgccactgg gagagggtga gcaaagagtg |
| 38341 | gaccacattg tagaggggat ttctgagtca ggaaaggccc caccatatgg gctccaagga |
| 38401 | gtctctgatt ctgtgggttt tattaggagc tttcaaaatc tcagctgagt atggggcaag |
| 38461 | ggcatttcag aaatgctgtc agggccacag ggaggatgtt tagtgcacaa aggccttccc |
| 38521 | tttgcctctc atggcatcac accattcagg cagctgcttt tggcacccac aagcaaggtt |
| 38581 | ggtgagacac cccccaccag gggcccccaa ggtgaagcag agccttcttc cctggggtga |
| 38641 | gataccatga gggtgtgacc tatgaggaca ggagaaacag gaacaagtgg aaggctcaca |
| 38701 | cacagaccaa gtgggtgtga aaaaggaagg agaatcggaa gtcaagcacc agggagggca |
| 38761 | cctgagagcc cctgaaggaa cccaaccata ggtgccaaag catccaggag ctttacagct |
| 38821 | cagccactac agccctagct gtgcaggagg ggaaaccaag tctcagaggg gaacctgagg |
| 38881 | tcacatgggt agacaatggt agagccaggg ctagaatgca tgtctgttaa cttctcttcc |
| 38941 | taatccaact cccagaaacc aaaatatttg agcagtgatg gtggaaactg agggcatgga |
| 39001 | agacattgtt aaatcattta taatgaaagc caccagccta accactgaaa tgctggaaac |
| 39061 | acttgagccc atcaaaagac tgctacaaac aaatcagaag tatttgggaa atcgggaaat |
| 39121 | tgactcccat gcagtgaata tgttgaaagt tacagcttct attaggtgtt tttggttttt |
| 39181 | gttttgttca gagacagaat ctcactctgt cacccaggct ggagtgcagt ggcctagtct |
| 39241 | cggctcattg caacctctgc ctcctgagtt caagtgattc tcatgtcttg gcctcccgag |
| 39301 | tagctgggac tacaggtgca tgccaccagg cctggataat ttttgtattt ttagtagaga |
| 39361 | cagggttttc cccatgttgg ccaggatggt ctcgaactcc tggcttcagg taatagacct |
| 39421 | gcctcagctt cccaaagtgc tgggattaca ggtgccagcc accaaatcca gcctgtatta |
| 39481 | gatgttctta agtgccaata agaaggaaga cagaaagggg aatagttcct atcctaactc |
| 39541 | tcctcttctt ccctccctgc ccccatccaa gagaaggcag gaaaccccac aaggggaggc |
| 39601 | ccaggcctgg tgggagaggt tctggcattt ctttggaagc ctagagaatg cccagggcac |
| 39661 | tgctggctgc agagctgaga tgggaaagaa gaggtcccct tgtggagagc acaggcccag |
| 39721 | gctgacacag gccagcttgt gggggtcaga gtgggagaga ggtgtttgga atgatgtgag |
| 39781 | actcaagtct ccccatcctg gcatttgcct gggccaggcc agaggagcaa tgaggccact |
| 39841 | gccctcaacc cccacatggc ccagttcaga ccccaggctc cttctcatgg ggcagctgag |
| 39901 | tggaaggggt ctttggggtc tgcactaggc ttagcaatga gcaaagccat ggccactgct |
| 39961 | ggggacagtg cctggcacat ggcaggctcc tgattatttt gtggaataaa agaatgaata |
| 40021 | aatgcccctg tggtgttagg aggcagaggg taggtataca aggtgggaga gcctttgaga |
| 40081 | gggaatcgga gtggcccctc ttctctgaag gactcagggc actcaagggt gacactcagc |
| 40141 | atcacatgac cgatgcattt ggggaaattg agctaaaaga ggcatggagg agctgcctgg |
| 40201 | gagagtgggt cccaggacga gaaatgagcc tgatcccatc actgccatct cagagagaga |
| 40261 | gacttgtcct agaagcagag agtagcttgg aaactggccc ctcacccagt ggttctagag |
| 40321 | gctgccagga ggcagagaca tggtatgaag gaaggaggca tcctaggcag aaaccaggag |
| 40381 | acctccaggt ctgcttggcc ccgtttggaa caaagacctg tgtccaggaa ccttgggctt |
| 40441 | ccccatgaga aagaaatgtt cggttcagaa gattttgtgc atccagctct gcctgtccgg |
| 40501 | gacctctgag ggtccatggc ctggcctcca gcctcctgcc tgctaaggat gccagggacc |
| 40561 | ctgaataatt caggagccag gacagcagga gaggcctcgc agggcccagg acacctgaca |
| 40621 | cgggctccca ggggaaagtg atgaattatt gacaggattc tggtgcccag ttgccgctct |
| 40681 | attgtgatca gtctgtgggc ccatctgggc tggaggcctt ttcctgccgg ctaattacgt |
| 40741 | ggggatctta gctctgccca gccgcccagc ccctcgtggg gccagacagc ctcctgtgag |
| 40801 | gggtgtcctc tttgccatgg tgacctggat ggccctgtaa ggcaagtagt cagaggacat |
| 40861 | ggagttagcc ccagatcctt tgcctgacag ccccagggaa actgaggccc agagaggcct |
| 40921 | cttgtccagg gtcacacagc aggttcagga cagtcaggtc ttcaccccag gcctcctgac |
| 40981 | acccgggcca gtgctccttc ccacagaaca catggcctca caactccatt tctagggaaa |
| 41041 | tgactcagct gtctaaggag catatgagcc cacccttcct caatcgtcct gggccccact |
| 41101 | ctcccaggca gctcctccat gctgacccat gcagaggagt aagaacctac tatgtgtgca |
| 41161 | gccaggatgc acaaaggcca gctgcggcgg gcagggtcgc ctctggggtc accacaaggg |
| 41221 | ccagagccag gggcttctcc tacctcttcc tgtcccagct tcttcccaaa gaatatctat |
| 41281 | agaagacggg ctgagggatg gcatcctaga agcagtgcca gggcctttgt tttgaaactg |
| 41341 | ttttcatggc aagcactgtg tttttgctta aatggtatgt tacagacctg tagaaagagt |
| 41401 | caaggtttat aaaactgctt ttctttatac tttacataag gctgagataa tatcaattgt |
| 41461 | ccatgtcaaa aaatataatt tttactttta tttgagagag gttggggggt gaactgttag |
| 41521 | gagttaaaac cccccaagcc actcttggag gtgtggcaaa ttgattcctt taatcttgca |
| 41581 | agctcctagc gtcccagtcc caccctccag gccatagaca agctctggct gtgcgaggct |
| 41641 | gtgcacagct tgaagggtgg gggactgcct ggacctgccc ctgaagccca tcctgcaaag |
| 41701 | gagactcgcc ctgtgtaggc tctccagatg gccagccctg ctcattatta gggagggagg |
| 41761 | aggggctggc atccgagtgc cggtgttggt agaggaattt cacatgagca gtctcctcac |
| 41821 | cactgtccgg tggaagtcgg agggctatag cagaaggagc caaaaccaca ctgctgccag |
| 41881 | gaggtggaat ctcccttggg tcctgctgag tgagcccaca tctgtctgac tccagagccc |
| 41941 | aggctcctca ctgtctacac cgcttccctt tagggatgga attaatctgc atgtggacag |
| 42001 | ggcttggacc agggtaggaa gagtagggga tttgcctgga ggccaatctt gctcagcaca |
| 42061 | ctgtgtgatt aaggcagtgg ctgaatggac taccagtgac agccccatca ctgtcaccac |
| 42121 | caccggagta tctagcaggg acttaaaagc acatgtcagg gaggttgttt cagggattcc |
| 42181 | tcctggaagg ggcgctggac aaggtctctc aggttcttcc caagtataag atctgagatt |
| 42241 | caggcaggtt aagcctagaa ggcaccagac gcctctgtga gcacttgcag ggggaatagc |
| 42301 | tccaccctgc cccctgggag tgtcttgtca cattgcagca cctctgcgga tcctggggag |
| 42361 | ctgccttggc tgttcttagg catctaattc tggagaaaga tgtgcctgat cgccccacgc |
| 42421 | tcaacaggtg ctcgacaggt cctaggggaa tcaaggcagc tgaatagcca tccacaaagg |
| 42481 | gtaatagtag agcagggatt ctcaaagtgt ctccccagcc agcagcttca gcatcacctg |
| 42541 | gaaacttgtc agaaatacac attctcaggc cctctcccac ccactgaatc agagccctgg |
| 42601 | ggtcggggcc agtggtgtga actgaagtcc ggtggaccca gtttggtgac ttcacattag |
| 42661 | aagcttgaag ttggccatgg cgggagtatt tatatctcag aaaccagcaa atgctacaga |
| 42721 | tgagcacctc tcctctccca ccagtgacac attttccagc atatccacag aagaggatat |
| 42781 | cccagccgtg catgttttca caagccctcc aggtgattct gctcatgctg aagtttgaga |
| 42841 | accactgatt tagaacaaaa aggggtgagg ctgcaaaaag atgagtgtat tttttcgtgc |
| 42901 | ccgtggtcta ctgttagaat gtctacatgg tacggaagct aaaagtcccc ttccctcttc |
| 42961 | attttataaa gaccaaattg agactcaggg gcagcagctc cagggctcct ggcccccagc |
| 43021 | ccagcacttc tgtctctggg gcactgcctg agctgggaga ggtgcatgca gctatggaag |
| 43081 | aaggcttcca tgggctgctc taagggccca gaagcccagt tcggctttag agtgaaggag |
| 43141 | tggcgtggtc agtttcatcc tcagggaggt ggggcacaat ggtggttggg gctctgagct |
| 43201 | ccaaagggga gcatttcata tccattcctc atggctgccc ctaccacttc ctcccctcac |
| 43261 | acagatggga agatttttaa aaaatcaatg ttcaccctcc acagacctca gggtggtaga |
| 43321 | gacatgaagc atgtctgagt cagaattcat ctgatacctc acctcaccca gatctaccat |
| 43381 | taattagctg tgtcccttcc ccttccatgg cctcactgtc ttcctctata aatctcaggc |
| 43441 | agcatcagat gatgcccaag gtcccttcca gctctcacac gccctggatg cttccctccc |
| 43501 | ctttgtgcct tcagctagaa atggtgtgtg tattctaatc cactctatgt ggaagcacca |
| 43561 | tgtaagaacg tctgtctgag ttccctgttc tctcccagag caacaaacag ccttctgact |
| 43621 | gtggggtgca atggggttga agtcaactcc atcagcattt attgggcacc cactgttgtt |
| 43681 | cattaattca gccagcagat attgagatct ctagtgtgct agaaatgtca aacagaggct |
| 43741 | agaataaaaa gcaccaccca tgcccttgag aggttcacag tttagaggca gtacatgaat |
| 43801 | cacgacaaaa cggactgctt tggagtgctg gctgtgtgct gggggctttg acaagaacac |
| 43861 | tcgcagatga tctcattcag tcctccaaca acaactctgt gaagtagggc ttatcagctc |
| 43921 | atcttatgag aaaaccgaca ctgagagagc ttaaggaagt tgcccaggaa gcaggtagct |
| 43981 | tgctagtcag tgtcagagct gggttcagat ccctgtctct ttgatgccag gactgtgctg |
| 44041 | ttaaccaaag cattgcaccg cctctcccct gctgtgcagt tccatgggct ctgccatcac |
| 44101 | acaggttcct gccatccagg aacttacagg ctgcagatgt ggaatggatg agtgagtgct |
| 44161 | gttggtgtgg gctggaaacc ttggtcatgg ttaggcgggt agaagccgga ggagctactt |
| 44221 | gtccatccag gaaactcagg tcctttccca gcctccacac tgagcatctg gaagcttctc |
| 44281 | tgcaagggct cagctaaagc tggatttcat gcacctttcc ccgcagtctg tagacatccc |
| 44341 | ctaagggtgc tcactgcccc ttggagctct cccaaggaaa tgggcctccc acaaacaacc |
| 44401 | atccacagtg ggacatgctg ccctggctgc aaccagtcct ggctcctggg ccaccttctc |
| 44461 | cagcccagcc cagagctgga gcaagcccac ctgagtcctc cccaagcagt cacagccctt |
| 44521 | gggatgtcag tcttgctcct caccctggtc tcttccatgt taccaccgtg ccccctctgc |
| 44581 | catccccagg ctcatcggga ccttccgcat ggtgctgcag aaggtggtag aggagagcca |
| 44641 | tgtggaggtg actgacacgc tgattgatga caacaatgct atcatcaagg tgggtatgcc |
| 44701 | ccacggagtt cctggacttt cccatatggg gccatctggg ggtctgttct ccctgcctca |
| 44761 | cacatggggt ggtctgggga atgcctctca tgcatggcga ggtgtcgcag gaggaggaga |
| 44821 | ctcaggtcag actctgctgg aatggctcaa tctgtggcca tggctggagg ccctgtggca |
| 44881 | tggcagggtc tgctgcccca cagtaggcac ccctgccctt cctacggtgg gaatgcacca |
| 44941 | actggtcctt ccatttggac ccagctcagg agtcactaaa gaggctcctt ttgtcatcca |
| 45001 | aaggccagac tgagccctgc tggcactcga gggcatgacc ttcactctgc acatctggct |
| 45061 | cgggtcctcc ctgggagggc agggacctca tttcctattg tttgtcacat cccagcactt |
| 45121 | ttgcgtgagc acgcgtgcac tagtgatgca cagtctagag gcacctgaca catgttctaa |
| 45181 | caaagaagga agcaacccta ccaggacagc ctggccccag gctctgctct gattcttcag |
| 45241 | tcctcttgag ctcagccgtg gccactcatg ggcagttggc atgatggtga ggaacaggga |
| 45301 | ccctgagtat gaatcttagg ctgctcacta actgtgtgac ttaggcaagc tacatatcac |
| 45361 | ctcaaagtga gcacaattac attatccacc tcccaggact attctgagga ttaaaggaca |
| 45421 | atacacagaa agtacttagc acagatatgc acaataaatc tataatattg ttagctatta |
| 45481 | tttcctgacc tcagtttacc tatgtataaa atgggactgt gccatggtcc cccagtgggg |
| 45541 | tcctgtgtaa tatatggccc tatgtagtgg ccaagagaaa cagcctcaga agccaggact |
| 45601 | gcagccacag ggagctagaa cagaaggaac cctcttctcc catgggcagg ggtggcaggg |
| 45661 | agggcttctt aaagttaccg gggtctcagc caccacagca aggggagaag gggtgcagaa |
| 45721 | taagctatgt atggacaccc atgggaaggc gggctgggag gagaacacag aaacctggat |
| 45781 | gaagagtgta gtgtgggaag tgagataaga gaattgggga gtgagcaggg atggacagac |
| 45841 | agcacagccc atgccctgga ttttcagaat cagacttaag atgtcagcag aggaaaggac |
| 45901 | tcacggatct cctagcccac ttgccaccca tctccgctac ccattgttat gaatgggaac |
| 45961 | aatgaagtcc tggatgggga atggattcgg ccacagttga cagcagggcc agcacggaga |
| 46021 | cccaggactt ccaatgccag agaccaccat tttcccataa caacatactt ggttccacca |
| 46081 | agagggtccc atttgttcca gaaaggacat ggggcttgga gttaggcagc ctgggctcag |
| 46141 | atcccagctc cagtacttcc tagctgtgtg acttaaagca agtaacttaa cctcctgata |
| 46201 | tgctaggtaa ggtaggttgc aatgttgaaa agatcaaatg agtgtacatt aaagcatctt |
| 46261 | agcatgatgc ctagcacagt gaggattcag aaaatatgtg cacctttccc ttcccttggg |
| 46321 | aaatctaagc ctgggtgctg gagcatccaa gcactgagtg agggccgcct gtctggggca |
| 46381 | caggaccaag tcacctctag accagtgagg aagggtgatc cctgtgcact gggggggaaa |
| 46441 | ctagagctgc aagaaagtaa tggctccagg acgcagagca ggaagcccaa tcatgactct |
| 46501 | ccactgctaa gcctgagccc ggttgagtgc tctacttttt gccagaggaa aaccctaggg |
| 46561 | cagctcccaa gattccctcc ctctccaggg taggaagggt gagtgtgagc ctgggccctg |
| 46621 | ggctcctctc ccggaggcca ctttcagctc attctgtcca tttccaacaa gccgatttct |
| 46681 | ggcgggccgc gcctcatgcc tgcaggcagc ccttgttctg aggagaggag gtggcctgat |
| 46741 | catggggatg ctgaacgaca ctctcggtta tgtagacagt ggactcgggg ggtgagtcca |
| 46801 | ggctcagttg tcctgggcag gccaggcccc tccaccttga gcaccaggga ggagtggaac |
| 46861 | caccagcagc gggacctgga gccaggtacc agtaagctga cccggtctgc acaagtcagc |
| 46921 | ctttcagagc ctctgttttc tcatcagcaa aatggggcag aggggatcat accatcctga |
| 46981 | cctcctccag tgaggcaagg gtgtggaagc gctgtgtaaa caccaccaag cagccacata |
| 47041 | tacggggtgg agattgctgt caccatccca gctgctcacc accgcctccc tcccttcaga |
| 47101 | ccagcctgtg cgtggaggtc cggtatcagg ccactgacgg cacagtgggc tcctgggacg |
| 47161 | atggggactt cctgggagat gagtctcttc aagaggaaga gaaggacagc caagagacgg |
| 47221 | atggactgct cccaggctcc cggcccagct cccggccccc aggagagaag agcttccgga |
| 47281 | ggtaacaggc aggacccctc tggctgccca ctgctcccaa gacacgggga agagacctgg |
| 47341 | ggcctggtcc tactgacagg cctctctagg cctagcbggg ctcagagtac agggctgagc |
| 47401 | ttctggagag acatccaagg ggtgggaaga tgtttctgta gccccccacc cagccgtcca |
| 47461 | cccccgaggt cactgggcag ggagcaggag actcagatgg agctgcaagg ccaaggcctc |
| 47521 | cccagtggcc ctgagggagg tggagctcta acacagggat ggggctagat ctcctgcctt |
| 47581 | tctcagagaa ggggagttgg ggataggagg gcccctggcc tctctggttc aagacccagc |
| 47641 | agtgtccacc aggtgccggc agcctgacct ctaccctggc ccagtgagga ggcccaagag |
| 47701 | agggcagctc ttcctgccag agtgaagcca aagatcctgg ctgggccctg gcctttcttc |
| 47761 | ctcttgagaa gggagggtac ccgggaaccc ccagaatcca gcgtcacgcc ctgcaagtgt |
| 47821 | cctgccacct atggatcaca ggaagctgga tccaggacag ctcattccac gtgcactatt |
| 47881 | tttacaaaac agaaaatgca attgtattac tattagagac caaggggaca gaatctgggc |
| 47941 | tagtctagta agatgttgtc catgggttcc taagtcacta ggaattatgt gttaaatgcc |
| 48001 | agtaagtcaa gggtgcatct gaaggaccag ggtgtgtttt gagaagggac cctccgtgcc |
| 48061 | actggaaaca tatccctgta agctccttcc acgctttcct ttccaagtaa agtttactca |
| 48121 | gtccctctgc tgaagaaacc ataggttcta aattagtgta attgaactga catactttta |
| 48181 | tgggacaaat atgttttctc ctttgcactt gaatgagttc acaccccctt aagcacccct |
| 48241 | cacacacagg tgcatgagtg cacacgtgtg cacatacaca tacacacaca cacacaagct |
| 48301 | tcagaaaccc tgggagccag atgagtaata gtaacaaggt caaagtgacc aggcctgcaa |
| 48361 | caaacatggc gggactgtct actccaggcc agccacgggc atggggcagc cccaggctag |
| 48421 | cttaaagcct gtcccctcag actcctggct ctttagcaga aaacccaggc ctgagtccta |
| 48481 | gctctgcctc ttactagtcg tgtgaccctt ggcaagtctc tgaccctctc tcctcacctg |
| 48541 | caaagaagga catagcaagg aaatccccct gccctgctgc tgggagagcc ggagggatca |
| 48601 | cagaggaaca ggtggcaatg gaggtgctga gcgctgccca tgtccaggct ggtgacagac |
| 48661 | aaacaggttt cttgtagcac aacaatgcaa agagtcagga atcgggttgg aaattgtgag |
| 48721 | aagaggagca gtgctcagac ggggagtgaa gggatgctga ctcagtgggc accacctggt |
| 48781 | cctcctcgac tgtctccatt cagaaaagag gttggcaggg ctggtccaga aaccagaagc |
| 48841 | cgggctctaa gaaagagctt ccagagaaca agatcggaag ccacacaagg gccatcagtc |
| 48901 | acagggaaag gaatgctgac cccaaatcag gagagctaag gcccattaag tcccatcttg |
| 48961 | actgtgccac tcattggctg agtgacactg ggcatgtcac cagcccctgt aggtcagtga |
| 49021 | caggaatggg ttcagcaagt tacatctggc tcccctccaa ctctgaggtc ctaagggacc |
| 49081 | catggatgct ccggacctgt gggtcacatc catgggaaac aacatcctgg gagcccttag |
| 49141 | cagccacgaa ggcaacctcc ctggggtggc gtagcaacac agagccagtt tctcactcag |
| 49201 | tcctaagaga gtgggccagg gtgctgatgg gggctctgga gagcttagag tcccagagag |
| 49261 | ccctaggcac caggaatctg gagataagag ggctcccccg acccttcctc acagcctggt |
| 49321 | ggcttcccca cctctcccca tcttcgtgtg gcccctccca gggtagcagc aagaagcggg |
| 49381 | agcaaaagga ggggcttcac cccggactgg gaattgggag agggtgacag ccgaagccag |
| 49441 | gcacccccac cctgcattgc aggggcagtg tgcaggagca cagtttccct gctgccactg |
| 49501 | gggctgccag cccaggtttg agagcacatt ggggacaggc atcgctgcta caccttctcc |
| 49561 | cgccaggcct agccatgcag ccagcaggcc tggttgtgga aaagaggggt tgagaaaaat |
| 49621 | tctagagatg ggccatttgc tggtgaggag aaggtggagc gggttcaaga acttggggtt |
| 49681 | ttcctgtagc ttaatcctgg ctgcccatat ggggccattg agttctgggt caaggagtgc |
| 49741 | tgaggtgagg agggggacct ggaagctggc cccgcagccc tagatgttgc atctcaccct |
| 49801 | tgtcacatag tgtgggttct gggaggaagc cagagagctc tccagaaggg acttggccaa |
| 49861 | ccttttatca ggaaaacacc tactccttaa agaggacaac accggggaag gggtgtcagt |
| 49921 | gcctcacctc tgaccccgtt aggagcccag gcaggcttcc cctgcatctg ctccctgccc |
| 49981 | tccatcctct cctgggaagg ccaatcccct tatagatcag ggtattcaat aaccacagtt |
| 50041 | ccctcttgtt cctgctttag ccacaatgag caagaggaaa atcccgttgc tggcaagcag |
| 50101 | cagtgtctca ccggccatct tgaccgttag ggtccggcgt ggggatcagc cgctccctgg |
| 50161 | ctgatggggt gaaatgaagg cctgctgggg gctgcgggga ggtagactga gtgggcagga |
| 50221 | aacagcctca gcccagacag gccccgggca gcccaggctg gaatcttcca cggatggagg |
| 50281 | ggaggctgat gccaggagat cctctgggca ctcctcacct ctccctccag ggcctgggtc |
| 50341 | caccccccag ccctgccctg cctggcctgc ttctctggga cttcacccac attcatcctg |
| 50401 | tcctcactct gggggtcaga tggttctaag caggggcagt gtggacctca ggcctcagct |
| 50461 | gctgtgacac tcactcctaa gaccctaaga atctgccatg aagttacccc gttcctcctc |
| 50521 | agggaatcag tatgggggct ctgcctgaat gaccaccaac cccaccgccc actgactctc |
| 50581 | tgccccaacg attccacctc ccctaggccc tggtcagccg catgccctct gagccactct |
| 50641 | gcccacttct ctagttcctg ccacgaagcc ctgatttctg ccggcttttt gcacaatgcc |
| 50701 | cccggtaatg tgccaggaag ctgtgctgtg tgacagagca caggctccac tcacagctct |
| 50761 | gctattggga acccccctcc ccatttgtga gatggggctc aaggatgcct cacagaagtg |
| 50821 | ccaggattga gtgaggtgca cctgcgagtc atccacccct gtgcctggca tgtggcaggt |
| 50881 | gctcagccag tgttcacttc cttcctcttc actgactcca tgttaccctg atgtcaactt |
| 50941 | ctaccccgag cagcacctga ccctcttgtt caggtgctgt ccaagcacct tctcagctct |
| 51001 | tgctccccac cctataccaa gggctctgca gaagctgccc acacaggagc cttactggcc |
| 51061 | caggggcagg tatagggagc tcatttactc aaagttcccc tcacctcccc aggctctcag |
| 51121 | tgttgcagag atgtaatgaa tccctaacct catgggcgct ccactctcag cagcacaaaa |
| 51181 | tcagtgttcc agacccttgc atggcagcgt atgcctgccc tagtctctgg agagaaagtg |
| 51241 | acttcggccc tgaccacact cacatgcaca cacatgtgta cacaagtgcc catgtgtttg |
| 51301 | cacacactca catgcactgc atgacaccag ggaggactct ggattctggg ctctgctgtt |
| 51361 | gatgctgtct ttaggagtca catcttagag aggacaaaga aagaaatccc agctttagtc |
| 51421 | ttgcagctaa actgtagaga cctgagcctt tcctcctgag tcccagtatt ctgcgactat |
| 51481 | ctcctcttct cattttctcc acctggcctg gctctcctgc cctccacgac ccccacctcc |
| 51541 | ttctgctgcc caaaccctct tctgctggtc tcctctctgc tgggtctcat ctgggaggag |
| 51601 | tttggggcag gagccacttt tctcattctc cttattgatc attcttccac tccagtggag |
| 51661 | gcctgcagaa gccaggtaac ttcctcctat gctggggcca gagggcagtg gggcacgtgt |
| 51721 | gcatggtggg gctctgagac agaggggcag agagtgggca tgcagaagtg tgtgcatgtg |
| 51781 | gggccagtac atgcagcctt accccaagag tgtttttaaa tcggtttcca cagcccctag |
| 51841 | agagctagaa aatcctctgc tgccttcctt ctccaggctg agccccagag ttgcagcagc |
| 51901 | tcccaaagct gctcagatga gccggggcag ccgggcgcac tgggattttg tgcttgagac |
| 51961 | acattcctcc tcctatgctg tgagctcttc tccgcttagt agtctcagct gatgtgggca |
| 52021 | gccgaggcct ggctgatgtt aacacctttg aattacagac tgacctgctt gcccaacgta |
| 52081 | aaggttagct ggccagcgct ggactgcagc tgtgctgtgt ctaggccttc aggtcttgag |
| 52141 | ccatcaggat atgcagtcaa gtctacctgg gcaaggcctg tgccagaaca gggtgtgagg |
| 52201 | agaggaataa tttgctaatt gttattcact ttcctgtctt catcctcatt gccacagcac |
| 52261 | tgggaaagca ttgagagaac attccagaaa agttttctgg aagcctccct aaagtgagat |
| 52321 | aggggggccg tttttccctg ctctgagccc tggagtggta gctcacttac cgccccacct |
| 52381 | acacccctag aactgccccc aaccacccgt gtgcactcca tagcaggacc cccagccctg |
| 52441 | cctcaccctc acagagcagg cttagcccac tgttccccta gaggccccca gagcctggga |
| 52501 | gctcccaccc cattggaggg gagcagggga gcaggggagc cggtgggcag aggagcaggg |
| 52561 | tggcccaggc cgggagggtg gccaggctca tctaaccctg tgttccctga ggaagctgcg |
| 52621 | acccacattg tggaatcatc agatcttagc ctggtagggg cgatgagctg aggccctgag |
| 52681 | gtatcagagc ttggggttgg aatagtggcc acccaggccc agcactgtgg gcccctccca |
| 52741 | tctcccccaa ggcagaaccc agggccatgg gacccctttt ctgcagacct aggcttgcta |
| 52801 | ccgtgcgaag ctgtggggtg agaggtctgt gggacaagga ggcccccggg gagcgtgcag |
| 52861 | gcccgtgggg ccggggctga ggccagtgtc tctggtccac agcccctcac acgtgtcccc |
| 52921 | ttgtctcctc atttcttccc cctactcagc aaaggcagag agaagaccaa gggaggcaga |
| 52981 | gatgacgagc acaagtaggt gtcccaggcg agggcagacg caacagcgtc tctggggaga |
| 53041 | cagaggcctc ctccccacag gctgtggagg gcgggatggg ctcggctgag agggctcagg |
| 53101 | agtgggctgt cgtggtagag ctggcacggg tcatggaggc ccagggaggc cttttcacct |
| 53161 | ggccacgggg gtgagggatg aggaggggtt agggtcgcgg gggaggtggc cagaccttct |
| 53221 | ggtttccact ctgggctctc gggggtgacc atcctcctct ccgtgtcttg ttcctcctcc |
| 53281 | actgttcagc ccccatcctg tggccttcgg gcttccctgg gagggagggg acagctaaag |
| 53341 | gctaagggga gaggggcatg aggacctcag ggatccctct cccaacaggg gcgaggtagg |
| 53401 | gccaggcagc tggaggcata aggaggagga actctgggta ccctttgcag ctgcaggtcg |
| 53461 | tgggtggagt tggagacccc cagaaagctt aggagaggcc accatttggg cggccctctc |
| 53521 | tatcttcatc tccccaaaag gcttcctgga aaaatgaggt cagggtgctg tctggagagg |
| 53581 | acaggagaag ggtcctgcag gtgggagggg ctggtcacaa gggtctggaa agattcgaag |
| 53641 | gctgggagtt gtgaatgggt cttgtaggca cccctagaag cacactgaca tctggaggac |
| 53701 | tctagcatta cgggatctca taagggcagt ggtagccaag gtggaccata ctggaggagg |
| 53761 | cctctggtta acacctgctc ttacagatga caaatctgtc tcagaacagg ggcagagctg |
| 53821 | gaaccagaag acagggaagc tgacttctga cccagagctc accatagacc caggaaattt |
| 53881 | agagaacttg actgtatcta aatttaatct aattctccaa acataccaat gagagctgaa |
| 53941 | aagccaggag tgtggtcttt tttatcttcc agataagcaa cctgagcccc agagatctta |
| 54001 | agagatttgc tcaaaactgt ggcctcaata tattaagaat tagttcatct gaagatatca |
| 54061 | tggaaatatc aggattgtgt gttgaggggt ctgaactgat caacactggt gtgggcttgg |
| 54121 | gatatccact ggcattaaga tcctggggaa ctcacagcct cattcattgc ttcaaaaaaa |
| 54181 | ggtatgagtt ctaactcgca tttgttacgc acaagcaaaa gcaatgatga tgcagtgtta |
| 54241 | actctgtagt gatggaggaa atggcgctgt gtaggaagag ctccagccca gagacctgaa |
| 54301 | ggatggagga gtttgccagg ttcccagtaa gggaagacac gtaggcagag catgtgtcaa |
| 54361 | ggctcagagc cagggaactg aatccagggt gggtggcgat gatggggaat gctgagctgg |
| 54421 | ggagtcctct tagggagtcc tcaagggttc aggtttctcc atagatgctt agatgtaaag |
| 54481 | ggcatatgaa tgagatacaa gcagcctgtc catccccagc ttctctgcct gagatcagcg |
| 54541 | atgctctaag gcccttcttg atgcccagct tcccagtctg tcccaggcca gacccacagg |
| 54601 | gacacagact ggcctgatcc ctttgactgg ctacagttgg agtaagaggt acctcacagt |
| 54661 | gccagcacat agtaggtcca ccaaaatact ggtttcctag cacttctctg tcctaatttc |
| 54721 | ttaccatctc taattagcac atgagataaa gtaaactggc atatagtatt gttattatta |
| 54781 | ttatgtgtag agcaatagga ctattgaaag aataggaaaa tgagatttct aagaagagat |
| 54841 | tgaacaaatt taaactcttt agcctggagg agagaaaact gtggagacag atttcaatct |
| 54901 | ctgaaatgtt aatgtgtggc aaagctggtt ggtatctatc tccactgaga agagataaat |
| 54961 | ggaaataaat ttaagttgaa gttaagttga agtagagaaa caagattcaa cccacgaaag |
| 55021 | aactcatagt gtgtgacatt ctgggatagg ctggtttggg gagatgagaa aacacccatc |
| 55081 | atcttccatg atgctgcttg cttgagcctt gcaaagggct gggccgccag caagaactga |
| 55141 | agagccagct tccctgacaa tcctggggtc aggacaagtg tgtgtgggtc ccccaagcct |
| 55201 | tctggtacaa cgtgggcaca tgtgcaaacg ggccagtttg gagacagggt ggttcttgta |
| 55261 | taaagggtca gcctatcctg cccacctatg gaaagctatt caaaaactaa ctgacattca |
| 55321 | acacactttc aaagacacct gtaaagacca aaattatgaa attccctgtg ccttggggca |
| 55381 | tggaaaattt ttaaaataaa cccatttagg ggcgcttgga taacatgctc cgaggttttg |
| 55441 | aaaattgggc tgtttgagca atgcaaagaa ggaccacaga ccctatttct catagacagg |
| 55501 | agtctttatc ctgattgatt acctgaggcc tgagctaatg agcctagtag ttccagttga |
| 55561 | agccagtcat ggggcagaag ccctgggcag tgaatggact cgacctgcag ctcatttatg |
| 55621 | gtcaggtctc tattagcttt cagaataatc cagagacctg aattaatgaa acactcgggt |
| 55681 | cactaaattt agtttggtga atgttcccaa gtcattatga atactaagct ctacctagga |
| 55741 | ccctgtgtgc accacacagc aacacgcttc taaatctggg ccataaaatg agcggagaaa |
| 55801 | tcatcagatt tatagtttac aataagtgaa ctaattttag catttttttc ctctagagat |
| 55861 | aaataccagt ctagattgta ggtgcatttc attctgacca tggtgaatgt agccacagga |
| 55921 | aactcaaacg gattctaaat cctcagaggg tcctgggata ctggcctccc cttggctctc |
| 55981 | acttctcaag ctttaatacg cccaagaata aggagccatt tgattgtaaa gtgagttttc |
| 56041 | actgagttga ttattggctt gttttctttg tctgtttctc accatatcct gtttttggta |
| 56101 | attgtagaac tcaactagac caaatgcaga attttacttt gaaaacaaaa aaaggccagg |
| 56161 | acaacggaca cctcaacagc aaattacatt ttttgaaatc taagtctttc agacaaatag |
| 56221 | ataatcttca aaattccctg attaagttga catttatttc aaaactctcc tttacagttt |
| 56281 | gccaagagaa gtaggcatac tgctttctgg gaactggtgc tgcaatcagg cagaaaggct |
| 56341 | ttttctatag tgaacttctg atgtgttact gatcagaaaa ttacaaaggc tagtggcagt |
| 56401 | gatgacatca tgctgtactg atcacaattc agattcattg aagagcaagt ctaggagaat |
| 56461 | cagaggtaca gagcctgtag taagaattct ggaaattaca tccttcacta cacatttctg |
| 56521 | catttttaat aaagggacaa agacaatatc cttttgagat attcccaggc acacaggagt |
| 56581 | gctaccagta ctaccacttc agacagctaa aactatgcag ggttggaagg gagagatttc |
| 56641 | tcctttcaat tgcttcaagg tgtagtagag atagttggac aagtatagtt tttgtttgtg |
| 56701 | tgtttgtttg agacagagtc tcactctgtc gcccaggctg gagtgcagtg gtgcgatcgt |
| 56761 | ggctcactgc aacctccgcc tcctagttca agcgattctc ctgcctcagc ctcccgagta |
| 56821 | actgggatta caggcatgtg ccaccacacc cagctaattt tagtagagac ggggtttcac |
| 56881 | catgttgacc aggctggtct tgaactcctg acctcaagtg atccacctgc ctcggcctcc |
| 56941 | caaagtgctg ggattacagg tgtgagtcac cgcaccggac caggacaagt atagtttttt |
| 57001 | aaagcctcaa tcatttcttt caaatctgtt tgtgttaaga aataaagtga ctttcaaatt |
| 57061 | caagggccat aagtgcccca gggatgcctc aggtcctttt ccacctgggt gagtccatgg |
| 57121 | gaccagcctc tgaaagccac tatttcttgc taccttgcac tccccccggg actcaggcag |
| 57181 | cagggccaga tcccatccca gcaggccggg cagccggctt ctccaggcag ggcctgcttc |
| 57241 | taacctacca tctcagagca cttcccctct ggggaagtgg ggaaggggca ggggagaggg |
| 57301 | aagtctgtgg ctggagcagg ctgcaatggc aaaggctaac tatgtaggtc acacatgcgg |
| 57361 | aagggccaag gactccaaga ataacacagc ctaggaatgg ccaagaagta atggtgcaaa |
| 57421 | gtcaaacgct gagccctgca ggagactcct gggtaattca ggagagacat agttgagcag |
| 57481 | cacggctggg caaaaaggaa tcccaagcac tgagacagga agtgacccac gaggaggccc |
| 57541 | acaaaaacta cacttctgaa gctgggccta tggcaggggt caggacagcc agcacccctg |
| 57601 | tccttggggc cagcaggtgg ggcaaaatcc cacaggatgc ttcagggcaa gccagccagg |
| 57661 | gtggtccttt ccccaccatc acacgattat ttctggtggg ttcattgatc tgttcaatgt |
| 57721 | tatgtcacca gcaatttaac atgcacagca gtcccttccc aaatgtttgg gtgctcaggt |
| 57781 | tctttttgaa tgagcccctt ctttgtaaac atgggtatga tctgtgagat tccacagatg |
| 57841 | acagcatcct gatctgtaaa ctatgctggc acacagacca tacctgtacc tatgggtgcc |
| 57901 | agccctgggg ccttttagct aaaatcccaa atggtcagga atggatggga ttcttgccca |
| 57961 | cagaaaagtg cagtcctacg gcatcgaggc aaaggacctg agatgcagta aaaatattgc |
| 58021 | tggcctagaa cacaggagct ttctgcttca atcccagttc tgccactcac cgtgtgacct |
| 58081 | cgcgattatt gtcccctctc tgagcctcag tctttttatt ggttgaatga ggagaagtat |
| 58141 | gtggccctca gaggattgcc aggaagatga aatgagcaga catctgcaga cattgcagac |
| 58201 | atctagaaag gcctttggcc ctatgtagtc tctttttggc ctgtatgtgt gtgtgtgtgt |
| 58261 | gtctgtgtgt gtgtgtgtgt gtgtgtaact cacctccccc atcagaaggg aggaagcttt |
| 58321 | tgaaaataat tccaaaggca tcagctttga ttttagagcc tctttctttc cctttcttct |
| 58381 | cattgtcgta tttcagatgg tatgctactg aagagtgcag acacatcagc cttcttccat |
| 58441 | tcctttttag gaattcaaag aacatgctaa tgttccctaa attgtgagct gctgccacgt |
| 58501 | gaaaagggtg attctcaatt gctccctcac tgggatatga acgtgctttg tcctgcatat |
| 58561 | gaacagtaaa gaaaggtcct ggggttggga tagggccagg tttggggaat aagattggcc |
| 58621 | ccacaatcct gaggagaggg gcttgaggtt tctaggtcat ctgcctgagg acagaaaggt |
| 58681 | tttccccaac ctcctattgc ccagcataaa gaacaaggat ctggggtctt agaaaccata |
| 58741 | gtcaagcctc cacagggaga tgtgtgaccc aaaaagggtg gactctgctg taagcgagct |
| 58801 | ccaggttgga gcctacacct ggctccacct ggacctacag gatgatgggg ccatacccag |
| 58861 | gaggagggag aacgggaagt ggagagagtc aggtatccac tcatgcaata tggatggggt |
| 58921 | aatggaacac tgcactttac cctctgctga tcctgctcct ggggcttcct ggtgccagga |
| 58981 | accacaggct cggctgcagg gacatcactg aaggacagtg aggacccctg ccccttttcc |
| 59041 | tcagccccgc tgactgcaag gcccttcacc tgggggcaca aggtcgcagc aagccagagg |
| 59101 | aagaggtagg aactatggag cctgccataa gttcctgggg ttgggggaaa ggggaatttg |
| 59161 | gcagtgagag gggacaggta gaaggggcaa aatccaggac cgaagataga tgggaaaggg |
| 59221 | cctatctccc cctttttcat ggggaccaag gagcatccca gaacacggag aggttggaga |
| 59281 | aagacaagtc aggctttgag caccagggcc atctgagaac tgaacagctc gtttcaacca |
| 59341 | catctcccat ctcctcatcg gcctctgccc ctgagtcctc tctggtccct gccccgccgt |
| 59401 | tctgatgctc tgtctccagt cctcgggctt tctctccaac cagctgagcc ggggaggatg |
| 59461 | agcgtgggga cactggcagg gctcggagct ctgaggagac tagactgagg ggctgggatc |
| 59521 | agactgaaaa gtccaagacc cagaggagct ccagttaaaa cggctctttc cggctcaaga |
| 59581 | ccacgttccc tgcttgctgg ggaccccatc cctctcctcc gtgtgtgaaa ggatggcaaa |
| 59641 | ggcggaagtg gaggggtctc tcactgccct gattccccct cctggctccc aatttgggaa |
| 59701 | gacagatccc gatctgtctc gggaccagta ggtgaggggc cgggtccatc tcccttctct |
| 59761 | gatgtgttct ctcatgtttg gctcttctgt gtttgtgtgt tttcctccat gcgtccctct |
| 59821 | ccctgcacct cattctggtg gcccccctca cagagccggg aggagcgtgt tctccgccat |
| 59881 | gaagctcggc aaaaaccggt ctcacaagga ggagccccaa agaccaggta ggacaggtgc |
| 59941 | cgcgtgagcc ccgcagcccc gcgcctcgcg gcgccctccc gccgctttcc agcccctgcc |
| 60001 | cggctgccaa aaggccctcc tgggataggt cgtcccaggg ccaggcccca cccagtgatg |
| 60061 | cgtggccctc taggaaggag acgccctagg gccgagggag ggaaacgggc agcgccctct |
| 60121 | gtcgggggtg cctggttaca aggctcctcc cgccctcgtt gctcccggtt cttccttctt |
| 60181 | cacgcagaag cccagtgttt taattagagc agagaatatc catcaagaaa cgctgtttgg |
| 60241 | ccaactccct atttctgggg ggaaaccgtt gtcccactag tacggggtcg gcggcaggcc |
| 60301 | tcgcccaagc gctctcacca ggctgcagcc tggcctttgg ggaggtcctg gggccgctgg |
| 60361 | agggcgcggc agggccgggc ctgggaggct ggagcagcag gtggcactgg gccctcccgg |
| 60421 | aggagcgact ggagagggga agacagctgc tgcagaggag gcgggaggcc tggaggaaga |
| 60481 | caaggggaga aatggagagg acaggggagc tgggaggggg ccatcttctc catcacgggc |
| 60541 | ccaccatcgg ggctcccggc tgccctcccc cagcatcccc tctgtggcct actggccctc |
| 60601 | aggctctctc ccccaccctc ttgcccccat gccaattcca gccgtgccct tcaccttctt |
| 60661 | aaatggagag agtacagctg ctggctgagg accaaaccca gcatccttgg gtggctgttc |
| 60721 | ggaatccaca tgtctgcatc tcattagatg aatacacacc aatgcattag gttctgaatt |
| 60781 | ccatcagctg tttgatatgg ataagttact tcctaagcct tcgtttctgt acctgtgaca |
| 60841 | tgagaataac gcccatcttg gcagggcaca gctctaagga ctagagatag tcatgtaaag |
| 60901 | tcctggtgtt gtgcctggaa cagagagtat ccacccaaca aatggtagct atttattgag |
| 60961 | aggtgcaaaa gtatggattc tttattccct accttcttcc ataagagata ttcagtgcct |
| 61021 | aagtaagtgg tatacaataa aagagcattc aattaaaata aaaaggcaag accagacata |
| 61081 | atggccattc aaatccaaga tcgggattag gtagaaaaac actgcagtta ttcaggccat |
| 61141 | aatattctaa gcggtagcaa ctaagtaaac ctcgaattta actctcagct ttctggatgc |
| 61201 | cagagtaaaa ggagaaatgg tcactatctc accatcagtc agcccaccta accagtcttt |
| 61261 | catcttcccc agatgaaccg gcggtgctgg agatggaaga ccttgaccat ctggccattc |
| 61321 | ggctaggaga tggactggat cccgactcgg tgtctctagc ctcagtcaca gctctcacca |
| 61381 | ctaatgtctc caacaagcgg tgagtggacg ggagccctgc aaccccagct gcccccaccc |
| 61441 | tgtcaggcag gacctggctt gccatgattg gaatttgggt agggaagaat cagggctcat |
| 61501 | ggacggcttc ttcctaacct aaccttaccc ttttctgctt ttccttgggt gtttttctca |
| 61561 | cctctctccc tgcaaaagca gagcacagca gctgcaggcc tgttctcagg tccttgaata |
| 61621 | cctcccagcc caaggaagcc acagacctgc ccaccccata tttgaaccta ttgaccccat |
| 61681 | gtctgtctct ctgttacttc tgcctttgat tagttctctg tgttgaggcc tctgaagaca |
| 61741 | actaatcctc actattcttg gcagtgcttg agtgtttaaa gaccatgatt ctgtccctct |
| 61801 | gcccactccc aggtctaacc actgccagtg tcctcctccc caacaagcag tccccatacc |
| 61861 | ccaggcctga tggtacattc tcttcctcag atctaagcca gacattaaga tggagccaag |
| 61921 | tgctgggcgg cccatggatt accaggtagg tgggcacctg gaggcctcat gtctttcaga |
| 61981 | ctctgctcta gtgggggatt ctagccggat gtgcattatc cactatactg aggcatggat |
| 62041 | ccaggggtca tagagaacaa caagctgaat ataagttccc aaagtaagct tgttcctggg |
| 62101 | aggcattcct agaagtatca tcagtagaga gatacaaacc caaagaaaag cttgagaact |
| 62161 | ctgcctatgc taatcaaagc ccttccagta tttcatgttc agtattggac ttcataaagt |
| 62221 | gagaagcacc tagaaaaacc ataaagagac caagaactac aaaaaagtat tcaaacagtt |
| 62281 | aaaataaggg cctttgaaga aagttttcct ggcatgattt ttaaattgtt gttttgtatt |
| 62341 | atttgattgc tggaagtaat gacgattctg tttatctctg gatggtgaga ctgtgagtga |
| 62401 | tttttttctt ctttttgctt ctctgtattt tctgagatta acacaacttt tttatttgtg |
| 62461 | tgcttctaag accagagaca aaagactgag acaaagagag gttgacagct gtaagaatgt |
| 62521 | gaatgtggcc aacagtgcag gcaggacagg tgatgagcat gtctggtggc tgctgggaca |
| 62581 | ccatctctca ggaagggccc agggaccctc cattgctcca gaccctccct tggaggctaa |
| 62641 | caggactcag ctataaatca gaagactgct gggctttcct aggattgagt tagaatgctg |
| 62701 | gctgctcaga ggggacaggg cttgcaagag atctcacctg gctgccactg cacttctgtc |
| 62761 | ctggggatgt tcggtctggg tatcagcacc aggccccaga atcagagtga gccccatcta |
| 62821 | ccagggtaga gctttatctc tgatgcctag ttccagaccc caagcacact aacccttctt |
| 62881 | tacggacaac cccacctccc ctcactcagg tgatgatgga aaggataaga tggcactttt |
| 62941 | ctatgtaaaa ggtacatctg gccatgtttt ctccagaata tacttcatct cccttcatct |
| 63001 | ttgttttagt tagtttccat ctactcaggc aactgtcttc ccaggtgcct gaaaaacagc |
| 63061 | cccaggcaat gtcaaacgga cctgcccctg tggttttaaa taacttcaag ccattggatt |
| 63121 | ccttaggggt ttgagaatgc cggcccctca cctctgccaa aacccaaaca caaagtgtcc |
| 63181 | tgagacttcc gagggctttt ccaagggatt gggctcaggg ctttgtttct ctgtgtgctg |
| 63241 | agaactggag aattccaaag aacaacgacc ccaactcagg tatcatgtca ctggcctaag |
| 63301 | aggtaaggac acatcaaaaa tagagtcatt attgttcatg aaacttattt ttgaaggttt |
| 63361 | attctatgcc aggcactgtg ctaggagcta tatatgtatt tccattgaag ttaatgtaat |
| 63421 | tcttcaacca cccaaatata ggtgttactg catttatagg taagaaagtg aggccccagg |
| 63481 | aaggtcagga acttgtccca ggtcgttgcc actaagttag ccaaggttag agccagggtt |
| 63541 | caaggccagg ggtgtctggc catagccata agagcaattg acttctctat atcaagcctt |
| 63601 | ctagacagct gctcccttcg ggtccctggt tcatcttcat cttgctactt agtgcttgtt |
| 63661 | ttccaaacct tttcaaactg cctcctacca gagactttta ttaactggac cagacattgt |
| 63721 | cccctccaaa gactttttaa accgaactga acaaaacggt tgttgtattt aacctggtag |
| 63781 | catagtgttt cccgacaagt tcattcacaa ttaaccttgc aaacatttga gtgagagcta |
| 63841 | tgaggatgca aatgtgaaat tattttcact tccaatacat acagtgtata atgcaataaa |
| 63901 | agcaggccgg gtgcagtgac tcatgcctgt aatcccagca ctttcagagg ccgagatgag |
| 63961 | tggattgcaa gaccagcctg gccaacatgg tgaaaccccg tctctactaa aaatacaaaa |
| 64021 | attagccagg catggtggtg gcgcatacct gtaatcccag ctacttggga ggctgaggca |
| 64081 | ggagaatcac ttgaacccag aaagtggagg ttgtagtgag tcgagaccgc accactgcac |
| 64141 | tccaacctgg gcaacagagg gagaccttgt ctcaaaagaa aattaaaaat aaataaataa |
| 64201 | ataataaaaa gcaataaaac cagatacgac ttcactctct tggagacttt gggtttgatg |
| 64261 | agatataaag accgcaggaa ggacacctcg ttggtgagat gtggggagac ttagctgaac |
| 64321 | tcagatccag gaagggttgt gagggctcag gaccattcta aaggttatgg cactgaaaga |
| 64381 | agcctggagg taaaaggacc gcggcgtacc catgctcttt gtttcttcca tttagaatgc |
| 64441 | acgtcacgtg taaactcttt cctgattatt gccatctcca aggcaagaaa ccacagtcac |
| 64501 | ccccctgtga atgtgcagtt tccccaccag agtgagcaac gcttggcact tggcagagat |
| 64561 | gttcttggtg gatcaagggg tcttgagtct ctttattacc atctcttcct ggcaccaaga |
| 64621 | cttaatacat tgtcacccaa catctctcca gttttcacct ccatttcatg cccctgccac |
| 64681 | tgacctgagg tccccagcct caactgcatg gttgtaccta ctttctacct ggtctccctg |
| 64741 | ccctcatatt gcctcctcca ctccaaactc catgccacca ctggagcaaa cttctgaaaa |
| 64801 | tgcaaatctg gtcatgtcac atctctgcca cctggaaaag tggggagtgg gtaatggatg |
| 64861 | ttgcagaagg acagtactaa agggcgcacc aactctcatc tctggctccc agcagatgtt |
| 64921 | cctgaagctg gatcaggtcc ctgggaagca ggtcacaaag cattattact ctcgggtttt |
| 64981 | cccaggacag gggtatagat ttaccactca gcattattcc ttgtgatcgc tttcatgaag |
| 65041 | ccactgggga gtatgtccct tatcttgaaa ggagatggtg gaatagtcag ctggtcagtt |
| 65101 | ggtcccagct gtggctccgt ttgcctcttc atcttccacc ctggaaaaat tgagtcctct |
| 65161 | gctgatgatt ggagagaagg atggccaagc ccctccccca gaaccctgga gaatgaccag |
| 65221 | ccatttttta ttttttattt caagtgcatc atttcccctt cctagagccc caggaggggt |
| 65281 | gggaggcagc aggaatggca ttccccttcc cccaacacca tgcgcctggt ggtctttctc |
| 65341 | cagcgccctc agcttcctct cggggctgcc cttcaaccag caatgagcac cctctggagc |
| 65401 | ttctcttccc tccgttgctc cttcaagcct ctgcccacct tcccctccac cctccgcctc |
| 65461 | tactgccaga gcttctgccc aggttgtcac cttcactggc tctgctacat ggaggaaggg |
| 65521 | agaaacgtat gaggcctgaa aagggggaca gggagaagta gcctgtctta tggccatgcc |
| 65581 | tcgagatgga aaacataaaa accaaccact ctcttggcag tgggaagagg acttgctgct |
| 65641 | ggcttatctt cggtagatgc caaaactatg tctgtccgct tcccagtcct gagttataga |
| 65701 | aagccttttt tattgttggt gggggcatta gttgtggaaa aattcatggg gtttttaaaa |
| 65761 | atctttggca aaaaagggtt cgtggaagtt aaaactctac aaactattgt gcaaagaagg |
| 65821 | acttctagtg tccgtttgct ctcttcatag taaacttctc agagctaagt tagttagtcc |
| 65881 | tatttccttt ttagctccct gaaggagcag tgaatattga acttctgtga agctccagat |
| 65941 | tctaagcttt tacttccgtc cctttgtcac ttcacgttcc aaacggaaat gtttgcttcc |
| 66001 | tagttcaagt gtcacttcat ttgtaaatat cccctttcct ggcaatgttc tcattaacat |
| 66061 | tggaatttct atttccttaa catgattact tctgatgtgt agatttttaa tcaccctcag |
| 66121 | gttatttttc agactttgat ggacactgga tgatcatttt agtggttatt ctttttcatg |
| 66181 | gaaagggaag ataattctct caagtaaagt cgtatttaga agttgcatca aagcacaact |
| 66241 | aaaatatgaa atctccaaga tgacaggcat gaaaagcaac cttcggagtc gcattagaag |
| 66301 | aatgtgccgg gctcagtggc tcacgcctgt aattccagca ctttgggaag ccaaggcagg |
| 66361 | tggatcacga gggagactga gaccatcccg gccaacatgg tgaaacctcg tctctactaa |
| 66421 | aaatacaaaa attagccgtg cggtggcagg cgcctataat cccagctact cgggaggctg |
| 66481 | agtctggaga atagcttgaa cccgggaggt ggaggttgca gtgagcctag atcgtgccac |
| 66541 | tgcactccag ccggggcaac agagtgagac tctgtctcaa aaaaaaaaaa aaaaaaaaaa |
| 66601 | aaaaaaaaag aagaatgtac agaggtccat gcttattcta gctggggaaa ggcttttctt |
| 66661 | gttaaaacac acgtttgaga gaggcaagtg aatcaatcat tctaagtatc atgcacaagc |
| 66721 | tccctacttg agagatcaac cgcttagctg aagggagatt ctgttggggt cactcacatt |
| 66781 | ttgtagagct ttctgctgtt taggatgcat tttgacacac atgatctcat ttaacctgca |
| 66841 | tacaacctta caggtagctg gtgtctctgc ttgtaactga aaaacacaag gctatgtggt |
| 66901 | catttgccct cacacctggc aacatgtcag gtctggggtt caatcccaag ttcagcaacc |
| 66961 | cccagtacat gcctctgtct atcttaacat ggccaccctg acaggaactg acacctccaa |
| 67021 | atccaaatga gacctgatgg cttaaaatga gggttcggga aaagtagtag tgatgtcaaa |
| 67081 | aattactggt gctctggctc tctctctctc tgtctctctc tctgtcctta tatcttttta |
| 67141 | gcttaaaaag ccaataattg gctggtcaca gtggctcgtg cctgcattcc cagcactttg |
| 67201 | ggaggccaag gcaggcagat cacctgaggt caggagttca agaccagcct ggccaacatg |
| 67261 | gtaaaaccca atctctacta aaaaaaaaat acaaaaatta gccgggcggg gtggcatatg |
| 67321 | cttgtaatcc cagctacttg ggaggctggg gcagaagaat cgcttgaacc caggaggtgg |
| 67381 | aggctgcagt gagctgagat catgccactg cactccaggc ctgagtgaca gagagagact |
| 67441 | cagtgtgaaa aaaaaaaaaa agccattaat catttgtggt aagctccaca aggaagaatt |
| 67501 | tgttgcaatc ccacctgtgc ctggctccag caggtttcca ggaaacattt gttgcatgaa |
| 67561 | tgaacaactg aaatagggct tcccaggata taagtaagat tgcagagctg gacgccacat |
| 67621 | aaaggacaca gcagagtgca cacaacatac aatcagtagg ctgaaaaagg cggctcaggc |
| 67681 | aggcaccaaa gccgcactgg ccatacaaac aaagaaattc agcaaacaat gtggaaaggg |
| 67741 | gggggagcca aattccagaa atgcaaagac gtatcagagg cctgcaggct tacatgagaa |
| 67801 | ttcctggagc aggaaattaa atgcaagtta atgaagactt tgaaagcttt attcctgagt |
| 67861 | gcatgaaacc tgtgacatgg gtttggcagc tctttctgaa gcagagccat cgacgctggg |
| 67921 | gaagaacgca gggcacttgg catcacctag gagctttaaa aatacagatt ccagcctggg |
| 67981 | cacggtggct catgcctgta attccagcac tttgggaggc cgaggcagac agatcacttg |
| 68041 | aggccgggag tttgagaaca gcctggccaa catggcaaaa ccccatctgt ataaaaaaga |
| 68101 | caaaaattag cccggtgtgg tagtgcatgc ctgtaatccc agctactcag gaggctgagg |
| 68161 | cagaagaatc acttgaaccc aggaggcaga gggttgcagt gagccgagat catgccactg |
| 68221 | cactccagcc tgggcaacag agtaagactc catcaaaaaa ataaaaatac agatgcctga |
| 68281 | gctgcatgtc caggattgga ttggattggt ctggaggtgg cctgggcatc agtgttttta |
| 68341 | atgcctctcc ctcccttcgg cccagcaagt taagtctagt gaacactgac ttagaggtta |
| 68401 | gccaactcat actcctctat aaatgaagac acttgaggca tagaaggaga aagagccagg |
| 68461 | atcacccagc agatgagagg cagtggtcag aatggagccc aggaggccag tgctggctcc |
| 68521 | cgggccctcc ctctgaccct gctgccccag cccctggacc cctgcgggac caggctccta |
| 68581 | ggctcaggca gctttccttc tggctccccc ttctcctgcc tgcaggtcag catcacggtg |
| 68641 | atcgaggccc ggcagctggt gggcttgaac atggaccctg tggtgtgcgt ggaggtgggt |
| 68701 | gacgacaaga agtacacatc catgaaggag tccactaact gcccctatta caacgaggtc |
| 68761 | agtggccctg tggggaaagg agcctctgta aatatggcag gagggtggcc ccagccctcc |
| 68821 | ccaggagaaa taggagtggc tggaagtcaa ggagcacaca gggctaccag caggggtgat |
| 68881 | ccaccctgtt acaaccccca ggacactgac aaacagagcc acatcttctg aatcctctga |
| 68941 | accccccagt ctagagcaca ggccgacact ggtctttgaa gcgtacacca cccgggtgct |
| 69001 | cctgggcaga ccccagcagt gcctgtgaaa gaaccccccc ccaccccact ccccaagagg |
| 69061 | cctggttccc actgtttccc aggccagagc ccaaggacag ggctgcctca ttccaaccca |
| 69121 | tggtggcact ggcaccatta gtaagcactt tctaccagcc aggcatgctc ctaaatgctt |
| 69181 | ctgaactgga ccatccaaag ttgtcactat caattccctt ttacacaagg ggacagtgag |
| 69241 | acttctgaag gcagaccttg tccaacctca cagtgccagc atcgcccttg gcgtgctagt |
| 69301 | ggggttctgc cctcttggct cggctccttc atggttgcct aaacttctgc gggcttctct |
| 69361 | ccagagcact ggccttgatt ttagggtgtg aaagagaaaa catttggtac ccactcctat |
| 69421 | tctttccagc catttgaggc cacatcaagg gtgagggacc tcagagacct tctactttaa |
| 69481 | tctccccatc ttacagagga ggatactgag gcctccatat ggaagggcct tgcccacaat |
| 69541 | ctcagagagt gttgctgata gagcaggggc caggctgccc acccagcttc cagcccaggg |
| 69601 | ctctggccac catcacaaat atggcacctt ggttcccagg ctccagatgg gaccccatca |
| 69661 | taatcagctc tggggaggga tgtgagaaat agagaaatac actcactcat caaaacccaa |
| 69721 | agaatgactt agaggcatga agaacagcga aagtgagact tttaataacg gtcttgcaag |
| 69781 | atggagtgtc tggtaggcag gcacccctgg ggcagtcaca acaggaattt atctcctagt |
| 69841 | gtgcaagtcc ctcccccact tccccattgg ttgagcacta tggggttaca atcttccctg |
| 69901 | acgtcgccta agtttcattt tcccccttac aaggttatac cccgctcccc ttcgatttcc |
| 69961 | ccacttaagt ttcgatttcc caataacaaa actttcttcc ctttcatggg ctgacccctc |
| 70021 | ctctacattc tgttcgctta ttgtgtcctt ctaggtgcat gagccgtgtg gtttgttgca |
| 70081 | ttcgcaggtt ggatgccagt acttagactt atcctgcctt gaaaatggac cattgaaaat |
| 70141 | gttttctcac caggatgccc aggcctttcc cagatgcctg atcacacatc agactaaccc |
| 70201 | agaagccaca ggcctgggcc ctgccatccc tttcctggag ggttccccag tctgtttctc |
| 70261 | ctggtggctc caggcagtga ggggtgccag gctgtcccaa gtaaggcagc tgagtcccgt |
| 70321 | accctgaggt gggtgagggc tgaggtgccc cctgtagctt gggggagggc atttctcagg |
| 70381 | cagctctgag agtcctcaga ctgtgcacct gcaggaagaa aacccaggcc cacctctgcc |
| 70441 | cttcagccca ggcctggccg aactctcctt tgtgaccaca aattgactct gctctcccag |
| 70501 | ctgctttccc acaggccccc cgagctggac aacctgctca ggacccctcc agccccaagg |
| 70561 | acattcagga ttgacatctc tggccttacg ttaggacaca tcctgactgg acaagtctcc |
| 70621 | gcctagataa gcatctatgt ccccaagaca ggcatggaga caggtccctg tggccccggt |
| 70681 | ggttacttga tagcagtgaa gccacttctg ctaacttaag ggatctccct ccaccaggcc |
| 70741 | cacacacctt ggctttcatt caaattactt cctctttccc aagggcacag agctgctctc |
| 70801 | cctactctgt ggctccccca gaaaactcct actcacccgg cagggcccag ctcaaatgtt |
| 70861 | cttgctactg agcagccttg cctgctctgt ctgggtcaga ggtcagcact cccctttctc |
| 70921 | tgcagtgtta atgtcctgga gttgaggttg gtcctccgtg tctctgtcct gctggtggac |
| 70981 | tggaggctcc cagtctcctg cctcgctatt tgttcagagc caggcatgta ctcggagggg |
| 71041 | ttcagtaaca ctcacccaaa ggaagacaca aacatccact gagcatctgc cgcacaccag |
| 71101 | acagtggcac gtggggcaac atggaggctg ccgagatgaa ggaggcacag tttccgccct |
| 71161 | gcgcaggtcc cctccttgtt tcagcctaga atctttctaa attccctatt tacttcctct |
| 71221 | aagactgact attcattctg ctcatctttg gacaatctta aatgtgtttc tgatcacatt |
| 71281 | tttgttcttt ttcacaaacc caaatagctc tgattttgtt tctgtttcct ctaaactagg |
| 71341 | gtttctcaaa ctcagcacta tggtatcttg gactggataa ttgtggtggg atcgtcctgt |
| 71401 | gctgtgtagg atgtgagcag catccctggc ctctacccag tagatgccaa tagcaactcc |
| 71461 | ccttagttac agctaccaag tttccagaca tgccaaatgt cccctgaaat cgccctcagt |
| 71521 | tgagaccacc attctaaact atcttactat gattccttcc agccccaaat cagcctttcc |
| 71581 | agccccaaag ctttgtttcc cttttcttct ctttctatgc cacattcctt ttcaatgaag |
| 71641 | gacatcctcc tcgtcgtggg aatgtattat ttctgactaa ttatctgagc tggtaggaac |
| 71701 | cttcctttgg ctccattaaa acaacagagg gaggtgggaa caatcaacat gacttaggta |
| 71761 | tctaagctat tacaaaagga aaatatgctc aggaaataac aggaatttga ttgcagacag |
| 71821 | ctcagagagt tcgggattct ggctctagct cagctagctc gctcccctgg ggctggcaca |
| 71881 | tctgcgggca cctggcctga tcaccctgcc tggccctgag cctgcctgtg tgcagggaag |
| 71941 | ctcaaaacct ttgcccttcc ggaacaagct ggccattcac aaaccagact aaggctcctt |
| 72001 | tcctgtgtgt cctgtgtgtg catctggccc cgccctgggc atcttgggag cgccaccatc |
| 72061 | cttcctcctg ctgaaaatcc acctctcccc tttgccttgg atccttctct ttctacagct |
| 72121 | caaagaacct ggcattgcac agcccaactc tgtctttgtt tttcttccag ccccttcttc |
| 72181 | cttgcctata aggtgttcta ctccagcata tgctaagtac aaccatgaag acccatgtgt |
| 72241 | gctcaaggac aggaactagg agtctgtcac ctctctctgg gcctttcctc attcccacac |
| 72301 | acttctccag tgacctcctt tttccctcca cccctccaca gtcagaccac ttgggttgtc |
| 72361 | ctcacttcct ccccccagtc acccctcaat ctctgcaggg tttctgcctc cagatgtcat |
| 72421 | tgacactgct ctcctcaagg tcaccaagga cattgctgtt cctgagtata atgtccatgt |
| 72481 | catcctcctc tcccttgatc acccagtttc tttcatcccg ctgcctgctg ctcctcttgg |
| 72541 | gggcccctca cgccactctc ctgcttcccc tgtctctcca gctccatctc cccggcctaa |
| 72601 | cttcttggct gaaaggctgt gtcttcttgg agccctgacc tgggcctgct tcccctccca |
| 72661 | tgctctcccc aggtatctcc tccatctcca aggtgtcagt taccatcttg tgctgacgat |
| 72721 | tcccaaatcc atatccccac ccgcctcccc agagcttcag aactctggcc agcacaccct |
| 72781 | gggcctgtta gtgtcatgca cagctgtcgc tgcttgctat gtgcttaccg tggtgcacac |
| 72841 | ctgtgttaaa gacttgacca gggtgtctca ttgcaacttc acaaccacac cttgaagccc |
| 72901 | cccaagtgaa tggcacccct ggagcagttc agcacgacag ccctggatca tatctccaca |
| 72961 | ttcataggat aataggtaaa ctgaggctca ggcaagaaag tgagtgatct agcagtaaca |
| 73021 | gccaggtggg gctggctctg aagctggctt taccctcagt gctcaagggc cagcccccag |
| 73081 | cagccaggag cacgttctct tcggacattt accccaagca cattggaaat atttctccct |
| 73141 | tctcccccac cacagttcac caaagcagca gcccctctac tcactgcccc acaccctcat |
| 73201 | cctcagcacc tgcacaccca ggccagggga agagatgggg actgcaaatg tgcatggcag |
| 73261 | cccacagcac caaaggacag tgcacaccca tggcatttca catcgactgc caactaagtg |
| 73321 | cttggcacac catggttcat ctgctctgag gcttgcgtta ttttacagtt tcacctctct |
| 73381 | gaatttggga tgtgtctcct aggcagcctt gtggcttcat ggcaatgtcc atgtggctta |
| 73441 | ttaaaccgta gtatatctta cagccagtag ccactttaga tttggtaaaa tatgttacac |
| 73501 | tgtctcatca gagcctcata acaagactct gaggtgggtg tcattatccc catttcacag |
| 73561 | ctcaaaaaac tgaggttcag agaatgtgtt gctcaaggcc acacagttaa gaaggtgcag |
| 73621 | agcggggact agaacccagg tctgcttgct ccctggccct gtgcctcttc tgagcacagt |
| 73681 | acaagggcat gggctgtccc acctactgtt ccaagttcct ttcccacccc acactagcca |
| 73741 | gcaccagccc cacctagggg atggggctct gcttcctacc acccaccacc agggtcaatc |
| 73801 | aggatcagat gagttgcctc tgctgctcct ctgaactttg gggctcaggg caaatgtctg |
| 73861 | gggtgcagac aggccctgcg aggagggagg ggcccaacac tgcctgggct gttgctgctg |
| 73921 | ccctcagtga cagcaggcct ggatccttcc ccctccagta cttcgtcttc gacttccatg |
| 73981 | tctctccgga tgtcatgttt gacaagatca tcaagatttc ggtgagtggg gagcagcccc |
| 74041 | tggccggcag ggccactccc tcaaactgca cctttgtgca gacttgagag gggccccctc |
| 74101 | tgtctagacc catgataaag aggcagcgcc gtgcctggac acacggctgg gcaagtaggg |
| 74161 | acaggctgga ttctggcccc cacccacccc tttcattgga tgcctctgaa tagtgcattc |
| 74221 | gcccgtaaac agtggccagc aagaaactgg cgtgggcagg aggagctgat gctgagcctc |
| 74281 | agtgagccac cccactctgc caacgccctc ccacttcacc acaaagctcg ggtcccacca |
| 74341 | ctgccccatg gaaagcctca cccttgctgg gcctgacggg tgggctgtgg ttctgcctga |
| 74401 | aaggtgattc actccaagaa cctgctgcgc agtggcaccc tggtgggctc cttcaaaatg |
| 74461 | gacgtgggaa ccgtgtactc gcagccaggt gagtacctgc gcatggccag tcagtcgagg |
| 74521 | tgtgcatggc tcagggagcg tggtgcacgg ggcccttccc actgtggcag ttcctgggaa |
| 74581 | aaggctggca aggaccacag tctggcgact gttagtacac acagccatct ggcctgcgga |
| 74641 | gaagtggcgc gcacagtctg tacacaaatg cagtgagcaa ctgcgcaccc agtctggtgg |
| 74701 | gttctcactc ataattaggt gagtaactct gcacagagcc tggaaggagc ttcatcacac |
| 74761 | gctctggagt gcatggcagg ctggtgcatc actggccata ggcaggctga ccagtagtgg |
| 74821 | tagaggatgc ggtgagggag acccgtcaca gcctgcagag aggctgcgcc cagactcctg |
| 74881 | cctcctgggc tggcacctgc tgagcagaaa agaacccctt tccacccctc acaggaccct |
| 74941 | gccgtcccct tttacagttg aggctcagag ccagggcttg ccccagccac acagctggcc |
| 75001 | gggggtgaag tcaggctgtg tgtccccaga gcctcactga gccacactat ccaatctgaa |
| 75061 | aggggtgatg ctggtcaatg ccagatgtag tgcggcggcc tctgagggac tctggtctct |
| 75121 | gaaaacactt cttacaagag ccccaggctt ttgggcagcc atgtgtgctc cgtggcgtcc |
| 75181 | tgtagggtaa cagcaatggt gttggcaagg gaaccccaag gggtggccca gagggcttgt |
| 75241 | gaggtgggcc aggcagagga agtgcctcag cctgccagat gacagctcac cacgtgggca |
| 75301 | ggttagggac caccctgtgt ccctgaagtg aatgcactgc tcagagtgct gtaatgaccc |
| 75361 | cattaggcgc tttgacagtg agaacataat ttcacccaat tgtcacattg ggccctcaca |
| 75421 | aaacagtaat gtaggcagca gcatttcttc ccattttgca catgagataa atgaggctaa |
| 75481 | gagaaatgaa ggggcttaga gataccacta aactagtagg ttgaacaaat tggcgatcgc |
| 75541 | ttgtggttca acctaagaga cgtccagctg gtgcacatta caactatgac ttagaccagg |
| 75601 | gaatctgagt ccaaaaccaa gattatacac ataaaaatca caagatcata gaacactcaa |
| 75661 | gctgcccaag acctgaaaaa catctagtcc agcctctgtg aagataaact gaagcccaag |
| 75721 | gtgatgaagg ggtttgtcca ccatctagga gtagcacccc tgtctccagc tcccaggcca |
| 75781 | gtgcctttgc caccacccca cacatgccat agccctcagc ggagggcagc cctgctgacc |
| 75841 | atcagtgcca tggggagcag ggaagagtcg gcctcctgcc atgttgcttt ccaggaagca |
| 75901 | tgcatagccg tggactactt gcttggaatg actggcatcc ctgaggataa gctcctccca |
| 75961 | gggctgagca gtggccctgg taccactggc aggcctgagg ccgagagcca agagaaagtc |
| 76021 | agggggtgga gaaaaaggca gatattagtc taatatggac ctctgggctt ctgggtagta |
| 76081 | aagtcctggt gaggaaacca ccagggcatc agtaagtgcc agatgttggg ctaagctcac |
| 76141 | tgtcccagca ggcctcaccc tcacgacccc atataggcat cattcccatt tcaccataag |
| 76201 | gaaactgagg ctcagcaggc ttaaacagct ggtccagggc cacattgtga gtaagcggca |
| 76261 | gaaacaggat gtgggccgag gtctccactt gggtaaccta gctcgagatt tgctgcttct |
| 76321 | gctgaatcca gccctgagcc tggtgccctc ccagggacag gagagcctga agtcacatgg |
| 76381 | gtcctggagt tgagacccaa tgtctttact ctgatatctc cagtttggcc tgaacttctt |
| 76441 | gatgagtcgt tggttccagc cagggcattg ttggacagca tgctcccaga gacactcctg |
| 76501 | ggtgctgctg ggaagctttg ggtggtgtcg atatctcttg gaactggaag gggtttcccg |
| 76561 | agagaacctc ttctcaccct ggcaggacca cattttgtca tttgtaccac cagatgcaac |
| 76621 | atcaggaaac tgtttactgt ttgctactct ctgttggggg tgaggacggg ccatacactc |
| 76681 | atcctcatag atcatagagg aagtcagggg catacactca tcctcataga tcataaagga |
| 76741 | ggtctgggat gcagcaactt ccccagctgg gctacccttg actggcaggt gtcagcccca |
| 76801 | ggctgaaggg aggtgaaatg atgtttcagg ctggtaagca tatagctcag gatctcatgt |
| 76861 | ggtccttgta tctctagcct gagatcacac agtattagga ctagaagggc ctcagaagtc |
| 76921 | atgagtcaag tgttaacctg atgtagggac ccccacagca ccatctctga ttggtcctct |
| 76981 | aaccttgctt agtcctccca gaaatggggc actcactact tcttatttta gatatcttca |
| 77041 | ctttctttag gtcatctcaa aatctgtcac cctgtaacct tcacccactt tcacacgtct |
| 77101 | ctctttcagg acaaaaagaa aaatagcctt taaatttgaa ggtaaatttt acattcctcc |
| 77161 | tgaaccgtat tctctttctt tgctaaatgt ccccaattca tctaaccatg cacacctcta |
| 77221 | tacatctacc cctgtatcca tccatccact cacccaccca tctacaaatc catccaccca |
| 77281 | cctgtccaca gatccaccca cccatccatg tatccatcca ttcacgcacc aatccatata |
| 77341 | tccattggtc cacccaccca cccatccgtg aatccatcca cccacccacc cgcctgtcta |
| 77401 | cagatccacc cactcaccca tatatccatc catccaccca cccacccatc catatatcta |
| 77461 | cccacccatc tatccacaga tccatccacc tacccaccca tccacagatc cacccaccca |
| 77521 | tatatccacc catccaccca cccatccata tatctaccca cccacctgtc cacagattaa |
| 77581 | tggctccttc tatccagtaa tccattcacc atctgtccgt ctatctctca gccggccagg |
| 77641 | cagctcacca cccatccctc tgcccattta tgcacccatt cattgagctt tctgtccatc |
| 77701 | tcctcatccg acacacatct gctctggcaa gacctgaagc tcctgggatt cctgggacat |
| 77761 | ggcccctccc tggaggcctg ccagcctggc tgaggttctc cagtgactcc tcatccacgt |
| 77821 | gccttcctgc cctctcacct tgcttgtccc tctcttcaga ctctactgtg gcattatctt |
| 77881 | ttctgagaca caggtggcct ggctattccc agaaaggcca acctctgtac acagccccta |
| 77941 | acatctccgg gagcccacca gggccacagg cttgcaggac acaggcctgg gctacggtag |
| 78001 | aaggtggaag aggagggagt gaaggaggga ggtgctgagt ccctgagagt tcagtgccca |
| 78061 | cctaacatcc cgggaagcag attcctaagg cacagtgatg cgcttccctt tgcttgccca |
| 78121 | ctgggcttaa agtaaacctg aaggggcaaa tccttcctaa agcgcctcct tccctgacat |
| 78181 | ccgtcctttc ctccacacag tcataggtca tgggacactg ggatgagact gacaatccct |
| 78241 | gtctttagga gactctcagt ctaaaatcag agccaaacaa tacccagatc agcacagtga |
| 78301 | gatgggaggt gtgcatggag agcacagaga acaaacacta aagagcccag gatcaactct |
| 78361 | tccgaggaag tcagggaggg ctgcatggag gaggagagac ttgagcaaaa tgagtagaag |
| 78421 | tttacaaatt gaatagggag aaagacaggt ggaggtggag agaacaggaa tgagggcatt |
| 78481 | ccaagctcaa agagcagcag atgcaaaggc atggaggtat aaaagggcat ataaaaccgc |
| 78541 | aacacctgtt cagcaaggag gaacacaggg ctgggtgggc tcagcagagt gagtcaggga |
| 78601 | gcactaaatc aggagcctgc aggccatgcc ttttgtcttc accccaaggc actgggaagc |
| 78661 | cccagagggg ctgaagatgg ggagcaggag catgagcctc cacctgggaa ggccctgtgt |
| 78721 | gcagctgtgt ccttcacagc tatgtgaagg ctggctgact ggggtggggc catagaagag |
| 78781 | gccacaggca gaaaaaccca attaggagga ggctgtcgtg cttccaagtc acaccactca |
| 78841 | tgggatatat gtccatgggc aggccatgca cccactgccc cagctccaga ggacctcaga |
| 78901 | ctctatcaca ccctgggcta gggacaggca gagctgtggc cccaggtccc gggactctag |
| 78961 | ggaccaagac agcatttggt tctgccaccc cttggcctgc cctgagcact gggagacgct |
| 79021 | ctgggtgggg gtgtctggtg cagtgcccac ccctcatcat tgcagagcac cagttccatc |
| 79081 | acaagtgggc catcctgtct gaccccgatg acatctcctc ggggctgaag ggctacgtga |
| 79141 | agtgtgacgt tgccgtggtg ggcaaagggg acaacatcaa gacgccccac aaggccaatg |
| 79201 | agaccgacga agatgacatt gaggggtgag gcccagctac cccagcccct ggagtctgag |
| 79261 | ccagcccttc cttcccccag ggagcccccg gtgagggttt gctgagagca cctgccaccc |
| 79321 | gtctccctca ccctgctctc gctcactctc ccaagcagcc ccactcttcc gaggcagggc |
| 79381 | aggggcaggg ggtgatggag gatggctgag aatatcagtc ctttgacatc ctttctgcca |
| 79441 | gtgagaaatg ggttgagaag agtcgatgct ggcagaccag aaccagcagc tgctgggtcc |
| 79501 | tgagtatagc agcaggaagt gctgggagag ccaaggtttc ttctggtgtg ccaattccag |
| 79561 | gcagctgata gcagctgttg agaaatattc tgtgaccttg tctggagtca gtgggtaaaa |
| 79621 | gtgctgggaa tcaatgaatc ctgtcttttg tgagctgggg gagagagagt ggctactgtg |
| 79681 | aagtttttgt ctacgaaaca aaagatacgg cacaaaacta taaaacactg acaataatac |
| 79741 | taagatcata tcccaatgta caatctacaa agcactcata tgttttagcg tgcttgagcc |
| 79801 | gatcatgttc ttgggaggtg ggtattatta cagccacctc aacagtgagg aaacggcagc |
| 79861 | tcagtgagat gggaagattt gcccagaatc ccacaagggg caagttccgt gaacacaagt |
| 79921 | gtctaatcct agccttgctc cctcagctgt cccttagaga ctgtgccagg acccaggagt |
| 79981 | gtgtagatgc caggatgggg gttggggacc tggacctggt gaccatggcc ctggctgtat |
| 80041 | gtgctggcag gaacttgctg ctccccgagg gggtgccccc cgaacgccag tgggcccggt |
| 80101 | tctatgtgaa aatttaccga gcagaggggc tgccccgtat gaacacaagc ctcatggcca |
| 80161 | atgtaaagaa ggctttcatc ggtgaaaaca aggacctcgt ggacccctac gtgcaagtct |
| 80221 | tctttgctgg ccagaaggta ctggggtatg aggtacagga ggctggggct gggtgacagg |
| 80281 | tatcacaagg gcaggctgat gggtgtgggg cctggggcag ctgggcaggt aagacaaggc |
| 80341 | tggaaatcat gttggccagg gacggactta gaggatcctc actgcctcct ggagtcctta |
| 80401 | gactgagagc tgcgcagggg gcatgagagg gaggagaggc tgggggtgtg ggaagagtgg |
| 80461 | agacaagtcc acacacaggc acgcacacac acatgcaccc actcatacac gcacgcatac |
| 80521 | caactcacac acgcacgcat accaactcac acatgcagac acgcacccac tcacccgtgc |
| 80581 | acacgtgcac ccacgaatac acacacacat gcacccattc acacacgcac acacacccac |
| 80641 | tcacacatgc acacatgcac ccactcacac acgcacacac acccattcac acatgcacac |
| 80701 | atgcacccac tcacacacgc acgcataccc actcacacgt gcacacatgc acccacgaat |
| 80761 | acatacatgc acccactcac acgcacacat gcacccatta acacacgcac acatgcaacc |
| 80821 | actcacacac gcacacatgc atccactcac gcacacatgc acccactcac gcacacatgc |
| 80881 | acccactcat acacacacat gcatccactc acacacgcac gcgcacccac tcacacatgc |
| 80941 | acccactcac acacgcacac atgcatccac tcacacacgc atgcacaccc actcacacat |
| 81001 | gcacacatgt gcccactcac gcacacatgc gcccactcac acacacacac atgcacccac |
| 81061 | tcacacacac atgccacgcc ctcacctgtg ctcccccttc caccagggca agacttcagt |
| 81121 | gcagaagagc agctatgagc ccctgtggaa tgagcaggtc gtctttacag acctcttccc |
| 81181 | cccactctgc aaacgcatga aggtgcagat ccgagactcg gacaaggtca acgacgtggc |
| 81241 | catcggcacc cacttcattg acctgcgcaa gatttctaat gacggagaca aaggtcagca |
| 81301 | gcgggagacc cggtgtgctg gggggcagag ggagtggcct gaagggaagg aatatgtgag |
| 81361 | atgccctctc ttcacaccac cgtcatcagc tctggtcctc agcctcacag gtgcttccag |
| 81421 | ggccttgcca gcagcccctg cctcaggggg agggtgagga tttgtggctc aggtcggctc |
| 81481 | agagctggcc tgagcccagc tgactggatt tgtcagctag tagttgtgtg acctgttttc |
| 81541 | ccatttgtaa agtgaaaata ataatgatta tatgatatga taattatagt atgatatgca |
| 81601 | cattatagca gtgtatatac tgcatttgta tataattaca gtgtgtgtgt atatatatat |
| 81661 | gatacctaat agtagtgcct atctgcagaa tcgcagggat tgactacctc ctaggatccc |
| 81721 | tgccctgtgc tgggttccaa ggacatagag tgagataaga atctattcct ggatcaaagt |
| 81781 | gctcactgtg tattgaggag atagatgtgc taccaaatgg tcaaaacata aggcagaaga |
| 81841 | cacaaaaggc cacatgttgt ctgatccatg tatgtgaaac atccggcaaa tccacagaga |
| 81901 | cagaaagtag attgccggtt tccaggtgct aaagggaggg gattgggact aactgctaaa |
| 81961 | taggtgcaga gtttcttttg agggggtgga actgctctgg aagtagatga tggtttatag |
| 82021 | cacagtgaat atacgaaaaa ccactgaaat gtacacttta aaagggtgaa ttttatgtca |
| 82081 | tgtgaagtat atctaaattt ttaaaatgct ataagtgtgt tttttaaaaa aaggcagaat |
| 82141 | aaaaaggaaa tgaaccaaaa aaactggatc atgagacccc tgtcagaggc ctgacaaatc |
| 82201 | ttagccataa gagaagggac ttgtgcctag gaattgggaa ggcttcgtga ggaagcagca |
| 82261 | tttcacaggc agagatggag agggatggcc ttcagcaagg aggggagggg tctgcactgg |
| 82321 | cagggtcacc gtggtgggac agagctgcaa aaatggcaca gggcccaagg tcatgctgcg |
| 82381 | gacttggaag gactggctct gtcctacaag tagactgttg acaattcctg ctctaagttc |
| 82441 | caggaagcag ggagctagac tttgccttcc cactgcttcc agctcaggcc cccgcaggga |
| 82501 | agaaatagac ccaagagagt gctccacccc agcgcagtgt aagaaggctg ccccacacct |
| 82561 | gaatggcaca catgaagttc tcagctcagc acccaggagc tggaggccag ggacccccaa |
| 82621 | aagaggcccc tcttccccag ggaaactgga tgtgacgctg ccccctcatt tttgttccca |
| 82681 | ctgccacagg cttcctgccc acactgggcc cagcctgggt gaacatgtac ggctccacac |
| 82741 | gtaactacac gctgctggat gagcatcagg acctgaacga gggcctgggg gagggtgtgt |
| 82801 | ccttccgggc ccggctcctg ctgggcctgg ctgtggagat cgtagacacc tccaaccctg |
| 82861 | agctcaccag ctccacagag gtgcaggtgg agcaggccac gcccatctcg gaggtgagac |
| 82921 | cccaggcact gtgctgtccc ccagggcctc cagctcagcc cccttctccc tgagtcacct |
| 82981 | gggtcccagg ctttgcctgt tgctgccctg tctacctgag gagtcatacc tcaggataag |
| 83041 | gcttctcccc aggaagcaga ggcccccact cagccccgca acaggactct gccctcgtcc |
| 83101 | actgcctgcc tgtgctctgt ctcacaacgg ccgccaggtc tcacgatggt gcctcccctc |
| 83161 | tgcccctctt cccagccacg gctgtccctg tggtgtctgc agccagccct gcttccatgg |
| 83221 | atatccaggc tggggggccg ttggggtgtg ggctgcctgg ccccaaagcc gggtgggatg |
| 83281 | cccccaccat ccacccccac ggcctgtctg tgagacggaa ggaggcctgg cccccgacct |
| 83341 | gccaccctta ctcaagctca ggaacgcttt gaactgcctc cccacagagc tgtgcaggta |
| 83401 | aaatggaaga attctttctc tttggagcct tcctggaggc ctcaatgatc gaccggagaa |
| 83461 | acggagacaa gcccatcacc tttgaggtca ccataggtga gtgctgggcc cacgggggct |
| 83521 | tcgggcctag gtgagtgctg ggcccacggg ggcttcaggc ctaggctgca ggtggtaagt |
| 83581 | gtgaggctct gcacctcagc cctgtcctca ctcttgtagg gaacgttgac ccctttcccc |
| 83641 | tgagaggcct caagcaccca caaaacacct ttgtgtgtgc atggggtgga ccacgcccca |
| 83701 | taaaggggcc aaccctcagc tccacctaca gggtgaggct gtgtttggga cctggggcag |
| 83761 | agggcaggga gaagcccttc ccggggctgg agaggagaga gtgggaactc aggccacagc |
| 83821 | ctgggccagg gctgggcctc gcactcaggc gtcatgagga ctccctgact ctcagcggag |
| 83881 | tggggacacg ggctaatgct ctctggctaa tgatgtgtca cgtctgagcc ccattccctg |
| 83941 | actctccctc tcccctttcc caaacccaag gcagcaccgg attggacggt gggaggggcc |
| 84001 | tggtggggaa tgcactctag gccttctggg cccattctgc tccaggcaac tatgggaacg |
| 84061 | aagttgatgg cctgtcccgg ccccagcggc ctcggccccg gaaggagccg ggggatgagg |
| 84121 | aagaagtaga cctgattcag aacgcaagtg atgacgaggc cggtgatgcc ggggacctgg |
| 84181 | cctcagtctc ctccactcca ccaatgcggc cccaggtcac cgacaggtgg gcccagcctc |
| 84241 | ccatcctcct gtggcctggc cctcccacct ccctgggccc ccaagacctc acctcccgcc |
| 84301 | tctgcccacc ccaggaacta cttccatctg ccctacctgg agcgaaagcc ctgcatctac |
| 84361 | atcaagagct ggtggccgga ccagcgccgc cgcctctaca atgccaacat catggaccac |
| 84421 | attgccgaca agctggtcag ggccaggcca ggggccagca ggggtggggt cctgggggag |
| 84481 | acggcgctgt cagagggcct tccctggaac acacaaagct ggtctgccca gggggctgca |
| 84541 | ggaacggccc cagcaggacc tctgttccca ttctcagccc caggtcccag ggcacagaca |
| 84601 | aggacaggag ccacctctag tcactcagcc tccagtgaat cctggggcag gagtgttggg |
| 84661 | ttccctgatt tttccagaaa tcttaaaagc aaggctaggg agacaggtgt ggtggctcac |
| 84721 | gcctgtaatc ccaacacttt gggaggccaa ggcaggtgga tcacctgagg tcaggagttc |
| 84781 | gagaccatcc tggccaacat agtgaaatgc cgtctctact aaaaatgcaa aaattagcgg |
| 84841 | ggcttggtgg cgggcacctg taatcccagc tattcgggag gctgaagcag gagaatcgct |
| 84901 | tgaacccgtg aggcggagtt tgcagtgagc caagatggcg ccactgcact ccagcctggg |
| 84961 | caaccgagca aaacttcatc tcaaaaaata aaataaaata aaataaaaca aaataaaaaa |
| 85021 | gcaaggctag ggaagggaaa tggggaaaag ggagaagcga gcagtgtctg aagctcagga |
| 85081 | gctgccccct cctcctctgc ccacccctct ccccccatga gccatgggca ctgactgggc |
| 85141 | gaggagtgca gctgttggca tgagacctcc ttctccccag cctggggaag cagggaccag |
| 85201 | cagataatcc cgcccttccc tgagctgttg ctgttccctg ttgaagttcc ctgaagctca |
| 85261 | gccagctcat attttataaa aatgaattaa aacctccaaa aaaatcaagg ctaatatgag |
| 85321 | gtctgctccc agccccctgc caatgtcctc cttgtcatcc ctgtcttgtg actataacca |
| 85381 | caattaaagc ccatagcctt tgcagtgtga cctgggtctg cagttatctg caaggcttcc |
| 85441 | ccctaaggag ctggggtaca agctgacctg tgtttcctgt gggacctggg tctcacagcc |
| 85501 | ctcccagtgc tctcagagcc agagccactc cctcttcccc caggcatctg ttcccatccc |
| 85561 | ctgccacagg ctccagcatt ctggagtgac gtcaggatct tggcacatcc agtcctaggg |
| 85621 | tttccctctg tctctggcca gccctgagcc ccgtagccgt gagttctgcc caggccctgt |
| 85681 | gagctcacca gagccacaga ctcacagccc agaggtggct tcttccttca ggaactgaag |
| 85741 | aacccccatg aacaccaaca tctccaggtt ctgagaacag aacctgggaa attgatgact |
| 85801 | tcctcatgat gaccgatact caggatggcc ctagcgagag ctcccagatc atgaggtccc |
| 85861 | tcactcccct gatcaacagg gaggaggcat ttggggaggc tggggaggcg gggctgtggc |
| 85921 | ccagcatcac ccacactcct gattcacagg aagaaggcct gaacgacata caggagatga |
| 85981 | tcaaaacgga gaagtcctac cctgagcgtc gcctgcgggg cgtcctggag gagctgagct |
| 86041 | gtggctgctg gtgagaaggg aggggcggca ggtgggggga ggatgaggcg gaactggaca |
| 86101 | aaggggaccc tgccagggct gggcagatga ggaagaatct acagagcccc tgctggtcag |
| 86161 | gctcgctaaa ccccggctcg ccctaccccc agccgcttcc tctccctcgc tgacaaggac |
| 86221 | cagggccact catcccgcac caggcttgac cgggagcgcc tcaagtcctg catgagggag |
| 86281 | ctggtgagga cgcaactgga cggcgggggc tggagggagg gcctggttgt gagaaggtgt |
| 86341 | cacaaccccc tttgtcatgg cccgagctgt cccccagttg ctgggttcac tgacaccccc |
| 86401 | tccttcgcag gaaaacatgg ggcagcaggc caggatgctg cgggcccagg tgaagcggca |
| 86461 | cacggtgcgg gacaagctga ggctgtgcca gaacttcctg cagaagctgc gcttcctggc |
| 86521 | ggacgaggtg cggcccaagg ggtcggggct ttgcctcatc cagggctggc tctctggggc |
| 86581 | ccctcaggat cagggggctc aatcaggagg ctagaccccc ttacccactg cccctggcca |
| 86641 | ccccccaacc cccagcccca gcacagcatt cccgacatct tcatctggat gatgagcaac |
| 86701 | aacaagcgtg tcgcctatgc ccgtgtgccc tccaaggacc tgctcttctc catcgtggag |
| 86761 | gaggagactg gcaaggactg cgccaaggtc aagacgctct tccttaaggt gctggagggg |
| 86821 | gcaggatgga tgggggcctg ggtcctttca ggggagcagc agcccccacc tggggctgga |
| 86881 | agcctgagtg acagggtggg gccttcaagc agcaggtgct cagagaagag ccaagaatgg |
| 86941 | gaaggacgtg ggggaagggg tggggaagga ggtgggggaa ggggtggggg aaggggtggg |
| 87001 | gaaggaggtg ggggaagggg tgggggaagg ggtgggggaa ggggtgggga aggaggtggg |
| 87061 | ggaaggggtg ggggaagggg tggggaagga ggtgggggaa ggggtgaggg aaggggtggg |
| 87121 | ggaaggggtg gggaaggagg tgggggaagg ggtggggaag gaggtggggg aaggggtggg |
| 87181 | gaaggaggtg ggggaagggg tggggaaggg ggcatgacgg ccccctgccc atcctcctgc |
| 87241 | ctccaccgga ccccagccca gcgggatggc tgtgaagggg cagggcagct ctgaccaggg |
| 87301 | cctctgccgg cccctgcccc ttccccacct cttgggccct ggcagccgtc aggctcctgg |
| 87361 | tgaccccatg cccaccccca gctgccaggg aagcggggct tcggctcggc aggctggaca |
| 87421 | gtgcaggcca aggtggagct gtacctgtgg ctgggcctca gcaaacagcg caaggagttc |
| 87481 | ctgtgcggcc tgccctgtgg cttccaggag gtcaaggcag cccagggcct gggcctgcat |
| 87541 | gccttcccac ccgtcagcct ggtctacacc agtgagtgag gacccctcac tcgaagcctc |
| 87601 | acctgggagg gggccggagg ggctgcccat cctggaacct caggctgccc ttccccacag |
| 87661 | agaagcaggc gttccagctc cgagcgcaca tgtaccaggc ccgcagcctc tttgccgccg |
| 87721 | acagcagcgg actctcagac ccctttgccc gcgtcttctt catcaatcag agtcagtgca |
| 87781 | cagaggtgag ggcctgggag gagggagtgg ctctggcttt gagagcacca gaagcctgtg |
| 87841 | agcctgtggg gactggagcc tgtggggcct gtgagcctgt ggggcctgga gccacaggtc |
| 87901 | agccagtgcc ccggtttctc aggggaagcc ctgcagataa ctgcagcaga cgcgggtcac |
| 87961 | actggaaagg ctacgggctt tagctgtggt tatattcaca agacagggac gacaaggagg |
| 88021 | acattggcag ggggcttggg ccaaacctca tattagcctt gattttaaga tttctggaag |
| 88081 | aatcaagaca cctgtcactc ctgcccccag gttccgtgga agctgagtga gtaggggtgg |
| 88141 | cttctgtttg tgcatctgcc cccccctctg tcacttgtcc cctgtctccc catcccatgc |
| 88201 | tgcaggtgct gaatgagacc ctgtgtccca cctgggacca gatgctggtg ttcgacaacc |
| 88261 | tggagctcta tggtgaagct catgagctga gggacgatcc gcccatcatt gtcattgaaa |
| 88321 | tctatgacca ggattccatg gtatgggtgg gctctggtgc cagggacccc agcagcacca |
| 88381 | cacctggccc ttgttccctg cactccacct gcgctgaggc tgtgccctca cctccgccac |
| 88441 | ccacctgcag agctccttgg ccaggtgctg gctgggaagc tgggagtggg ggctgacatc |
| 88501 | tagctcctcc tgcctgcttg cggcagcctg accccttccc aggccagcac atcctcacct |
| 88561 | cctgtctcct acagactgag ccctggaggt gtgccagcaa gtcctgctgt cactagcctc |
| 88621 | cccaccccag ggctccccga cccctgccct cacctaccac aaccagtaac agccttgcca |
| 88681 | tcctccgtgg aggttctgga gcagggagta agggattggg gtgacccccg agagttagcg |
| 88741 | agccaccttc tcacatacca cctcagctgc tgaggtgccc agatagccct ggactagagg |
| 88801 | taggaggacc tcatgtctag tcctgagccg ggcatctgcc atttactgac tgcttggcct |
| 88861 | tgaacaagtc tttggtgggc cctgagactt ggtttcctca tctgtaaaat ggggtgatca |
| 88921 | cacctgtccc ttacaacaac tcatggcgct gtggtaagga ccaaacgaga tcacaggtgt |
| 88981 | ggacagcaag caccaagagg cttctgggtt gtctgttgcg tcagggcaaa gctgacttca |
| 89041 | tgggccggac cttcgccaaa cccctggtga agatggcaga cgaggcgtac tgcccacccc |
| 89101 | gcttcccacc tcagctcgag tactaccaga tctaccgtgg caacgccaca gctggagacc |
| 89161 | tgctggcggc cttcgagctg ctgcaggtgg gactgcaggg aagaggggct gaggcctggg |
| 89221 | gactggaggc tgggagttgg ggcctagggc tgggggctgg accctgaagg ctggggcctg |
| 89281 | gggtctgggg cctgggggtg gggcctgggg gctggaggct ggggcctggg gctgggggct |
| 89341 | ggggctgagg gctggggcct ggggcctggg gggttagggc ctgggcgtta ggtcctgggg |
| 89401 | gttggggcct ggagctgggg cctgggggct ggggcctagg ggcctctctc ctacccatcc |
| 89461 | tgaccaaagc tgggggcgtg gtccttaggg ggtttccctg tctccccaga tcatggcaaa |
| 89521 | caactcatgg ggaaagagac cctgtccctg ggctccccag tgtgtgacct gtgaccccca |
| 89581 | ttccccagat tggaccagca gggaaggctg acctgccccc catcaatggc ccggtggacg |
| 89641 | tggaccgagg tcccatcatg cccgtgccca tgggcatccg gcccgtgctc agcaagtacc |
| 89701 | gagtggaggt gcgagggctc tgtgtggccc ttcccttttg gatgaggagt ctgaggaccc |
| 89761 | aggaggggaa gtggcttgtc atccccctcc caccaccatc accaggagcc agcagcagac |
| 89821 | ccaggctcct gccccagccc agggcctgcc cccatctgca ccaagtcgca ctcccatgtc |
| 89881 | ccaggaccat gcccagccct cctgtctgca cccctgaccc tgcacccctt ctccgggcag |
| 89941 | ccccaccctc atccctggag aacgcctgcc cctcctctgc tctcctggcc ctgctcccac |
| 90001 | cctttgaaat ctggggtgaa ctactgccca tcccactgcc cggttcccta ttggatggtc |
| 90061 | cagcaccccc atggctggct cccttgacta aggggctctc ttctctgcac ccaccctcca |
| 90121 | acctctccca ggtgctgttc tggggcctac gggacctaaa gcgggtgaac ctggcccagg |
| 90181 | tggaccggcc acgggtggac atcgagtgtg cagggaaggg ggtgcagtcg tccctgatcc |
| 90241 | acaattataa gaagaacccc aacttcaaca ccctcgtcaa gtggtttgaa gtggtgagtg |
| 90301 | caggccctgg cggaggacat cctgtggcca gtgtggctcc actcagccag ccggcttcct |
| 90361 | ctgccccttc ttggaggctc aggctcctgt cgccaacacc ccaggacctc ccagagaacg |
| 90421 | agctgctgca cccgcccttg aacatccgtg tggtggactg ccgggccttc ggtcgctaca |
| 90481 | cactggtggg ctcccatgcc gtcagctccc tgcgacgctt catctaccgg cccccagacc |
| 90541 | gctcggcccc cagctggaac accacgggta tggccacatc caccctgcca ccaagcctgg |
| 90601 | ctccacgccc cccagggaag ggctccaggt ctccgcccag tccaagccgc gaccagagtt |
| 90661 | tgctctttgg ggccgagggg gtgggcatag aagaaggtca ccctggtggc caaggaaggc |
| 90721 | tgcccaaggt gacgccagct ctacagccag agagggcaga actggagaca gcctgggggg |
| 90781 | gcctgagggc agaaagcccc ttgcgctggt tgatggagaa gacccaggcc tccccgccac |
| 90841 | ctccctccca ccggcctccg cagcttcccc ttatctcggg ctctcttctt ccctccccat |
| 90901 | gcccatattt tctcccttga ctgcctgtcc ccctctccct cagaaagttc cagaatcagc |
| 90961 | tttagttctc cgcaccttcc tgccccgcca atctcactgt tcctcttgct ccttcctctg |
| 91021 | cctgtctgtc catctatcca tctgtccagt caggcttctc cggcgctgcc gtgtgctgtg |
| 91081 | caatgggggc tcctcctctc actccacagg ggaggttgtg gtgactatgg agccagaggt |
| 91141 | acccatcaag aaactggaga ccatggtgaa gctggacgcg gtaaggcggg tggggtcagc |
| 91201 | cccctgctgg ctgggaacat gcaacttcgt gtgacacatc ctgtgaacca gactatctgc |
| 91261 | cccgagagaa aaggacacta agagcctcct ttggcatgtg actgtcgggg gctgagcttg |
| 91321 | attgtgtgtc caaacagctc cctcctaata ctatcctgga atgcacacgc gtgcgtgtgg |
| 91381 | tatgtaaatg tgcatgtgtg tgcgcatgtg tgtggtgtgc atatgtgcat gtgtgtgtgc |
| 91441 | atgcatgtga tgtatgtgca tttgtgcgtg catgcgtatg tgtggtgtgc atatgtgcat |
| 91501 | cgtgcatgta tgcatgtggt gtatgtgcat gtgtgtgtgc atgtatgtgg ggtatgtgca |
| 91561 | tatgcacgtg cgtgcgtgtg gtgtgcacat gtgcatgcat gtgtggtgta tgttcatatg |
| 91621 | cacgtgcatg catgcatgtg gtatgagcat gtgcatgtat gtgtgcatgc gtatggtgtg |
| 91681 | catatgtgca tgtggtgtgt gcatatgtgt gtgcatgtgg tgtgtaaatg catatgtgca |
| 91741 | tgtgtgcagt gtgcatgcat gcgggtggta ggtaaatgtg catgagtgtg gtatatatgc |
| 91801 | atatatgtgt gcatgtgcgc ttgtgtgcat atgtgcatgt gtgcatgtgg tatgtaaatg |
| 91861 | tgcatgtgtg catgtgtgca tgtggtgtat gtgcatatat gtgtgcatgc atgcttgcgg |
| 91921 | tgtgcttatg tgcacatgcg tgcatacatg tgggtgtgtg catgtgcact ggcatgtggt |
| 91981 | atgtgtgtat gagagacaga gtgagccatc acagtttatt ataatcacct gctataattt |
| 92041 | ttactccaac aaatgacacc ataggtaatg attccttatg agatcatcag tgtcctttcc |
| 92101 | aaagagtccc tggttttcca tcccagccat tcacaaatga cacttccctg gcctgggtca |
| 92161 | gaggaggatt tccaggtgga agctccttat tcctcctggc tttgggccta ggactgttca |
| 92221 | tctgccagag agagaactgc catctggggg ttgggtgtgg aagtggcgta caagctgtag |
| 92281 | accctacagg gaagggcaga acgtgggcca gcctggaaca cagcccactg ttcctttggc |
| 92341 | cacccaaaga aacatcctca ctcagaccct ttgcagactc accagtcaga gtgctcttat |
| 92401 | taatgcaaag ttggccttgc gggcacaggg gctgccagca cacagtaatt tccatctcgg |
| 92461 | ctcctccaca caccctgtgc taggccactg cctgccactc caggccccag tggctgattc |
| 92521 | tgcccctgtc tccttggttc ctctgcagac ttctgaagct gttgtcaagg tggatgtggt |
| 92581 | gagtgtgggg gccatgcagg ggctctgggg tgagagggtc ctttattggc aatgatgtca |
| 92641 | ggccaaaggg tccagcatca gggacagagc cagccccagc ccccgcatgc ttgggccagc |
| 92701 | acacctcccc taagatgcag tggaaaagag ctgggtgagt gcaggactcg gtgccagtcc |
| 92761 | tgcttgggcg agtggatcgc actggcaggt cacaacactc tgtggcctgt ggcaccttct |
| 92821 | ccataaaata aggccctgcc ccttggacat gggtggcccc acagagcctc atggagccca |
| 92881 | aggcttcctg ctgacagatg gcggaatggg tggaggctct cgggattgtc caggcaggag |
| 92941 | gagtccatgt aggactctgg acctggccaa cctgcaggct gaggaggaga aggagaagaa |
| 93001 | gaagaagaag aagggcactg cggaggagcc agaggaggag gagccagacg agagcatgct |
| 93061 | ggactggtgg tccaagtact ttgcctccat tgacaccatg aaggaggtga gacctcgggt |
| 93121 | agggtgaggg gaggtgaccc cctccacact cagaccctcc tgtccagctt ctttcccacg |
| 93181 | gcccccaaga gctggatccc aactccattc atgtgagttt gggatggttt tgtctcacat |
| 93241 | ccttgaaatc ctagctcaga actcaccttc caagatgatg gtcccatcta ccttccctgc |
| 93301 | ttggttttct tttgtcctca ttgactcatt ccacaaatgc ctcttgggta tatgcgatga |
| 93361 | gccaggctcc atactaggtg ctatgggagc caaaagatgc cacacctgcc ctgatgggcc |
| 93421 | tccggtttac tgggcaaaat ggacatgtaa acagagactt agagaggact atgtgataac |
| 93481 | aaaggcaaat catggcttgg gggaatcagg gaaggcgtct cagaggaggt gacctttgtg |
| 93541 | gaaaaggaga aacatgttct cagaggccat aagggaacaa ctgcttatca gtagtcctta |
| 93601 | cgactcttct tcataatgtt ttattttaca catcttggtc atcggcacgt gaatgattct |
| 93661 | tcccctatta cacatatgtg ggttccatct gtttggccag attgcaagtt ccagaaagcg |
| 93721 | catttctctg ctttcttgtt tgtgtcctct ccacgctgcc tacctagctc agggtgctct |
| 93781 | gactggccac ctgaccagga gggacacatg cctgcagttg tgtttcctca gtggggccag |
| 93841 | agctgatcca gccacatcct ctcccaggcc ctttctgtga cccaagctag gtgtgatatt |
| 93901 | tattagagca cacattaagc tgctgtagca agttagagtg aagtgaacaa gacagcagtt |
| 93961 | tatttctcac ataacatctc agagagtggg ggttaggctg gtatggtggc tcagtggtgt |
| 94021 | caaggactaa gatcctgacc tcttgtttgt cacatctgta aggttggagg tgactcaaca |
| 94081 | tcatgttcta attcaagtgc acaggaaggg ttaaagagga gatgaggcat atgcttttct |
| 94141 | ttttcagggc ccaatccaga agctgcacat atgacttcca ctcacattga tcagaatcta |
| 94201 | gtcccttagc tacacttatc tgcaaaggag gctgggaaat gtaatctttc acaaggtggc |
| 94261 | tgtgtgctca gcaaaacttg taaaaatagg agaacagatc attgaggaca actggtagtc |
| 94321 | tcgtctccca ccatcaagtt ggccaggctg gagctgcaag aggctgcctg ttgtcgtctc |
| 94381 | tactcctgca attttcacag actgccacca ggtggcggtg gcgacttagt tgaaacctgg |
| 94441 | tttctagttt ctagtaagat ttattctcgt ttccagtaag atggggtgtg ctgagtgaaa |
| 94501 | gaaaatatag tacattttct tactgttata cttttgtaca ttaaaacaat ttattaatat |
| 94561 | cactaaaagc aacattaaaa tgcactgtac ttttttaagt agaaaatgta aatatttatt |
| 94621 | gcaaggtgtt atttcttttt tttttaaatt atactttaag ttctagggta catgtgcaca |
| 94681 | atgtgcaggt ttgttacata tgtatgcatg tgccatgttg gtgtgctaca cccattaact |
| 94741 | cgtcatttac agtgggtatt gctcctaatg ctatccctcc cctctccccc agcaccacca |
| 94801 | caggccccgg tgtgtgatgt tcccctccct gtgtccaagt gttctcattg ttcagttccc |
| 94861 | tcccatgagt gagaacatgc agtgtttggt tttctgtcct tgtgacagtt tcttcagaat |
| 94921 | gatggtttct ggcttcatcc atgtccctgc aaaggacatg aactcatcct tttttatggc |
| 94981 | tgcatagtat tccatggtgt atatgtgcca cagatgcata aacccctaag taccactagt |
| 95041 | cacactgtac acattataaa ctttttttaa cccacttaag cagagcacat ggtggacttg |
| 95101 | aaatgcagta gggaagattt tctacttcta gtgcattaag actggtctgg gcccacaatt |
| 95161 | tggggtcaac agactcctcc ccaggaaacc caccttctgt ccttttcatc tcatcttttg |
| 95221 | gcagcaactt cgacaacaag agccctctgg aattgacttg gaggagaagg aggaagtgga |
| 95281 | caataccgag ggtgagccct ggaacctgga actctgcctc ctcctccccg cccctgggtg |
| 95341 | gtcagctctc ctgcccacct catcacctgc ttctcttttc cctcctgcca gccctcccag |
| 95401 | ccttagtagc cagggaagca gcatcagtaa tccatgggca gtactgggca ggctaaggcc |
| 95461 | cttgtccagg gaggctttta ctctgaccag ttcagcaccc acagtgatgg gcagacattt |
| 95521 | agagccacag aacatcagag ctagaaggga cctcagagct cattccatcc agcattttcc |
| 95581 | agactctttt ccatgaagaa aattgatgga tgttctagaa ggaacaaatt agttttggtc |
| 95641 | aaattagttt aggaaaagct gattgaaaca gcttgttttg gtgcaggact tttcataccc |
| 95701 | tttactgtgc aaatgttatt atacatctct aaaaggaaga cacagtataa aatatttccc |
| 95761 | cagcttattg gatcacagta ccctttcttc taaagcatgc cagcagcatc tgcaccaggt |
| 95821 | gctccactga atgaggtttg ggaaatgcta atacagagtg ttattattat ggacaagaag |
| 95881 | agggaagcta gtgaggaaag tgagtgggca aggaactgcg cagcaacagg cctccacccc |
| 95941 | caaacccatg ctccttcctg cccctctctt ccaaagggca tgaagacagt cttcagacac |
| 96001 | cttcccgggc ataaacccac tggggccccc agcacctcca tgaggcgggc atgctaggga |
| 96061 | gtattatctg catttgacag cacatggaca tccgagagtt aagttagtaa agcaaattag |
| 96121 | cgacagagct gggtctcgaa tccaggcctt cctgctctgc tcatttctgc tccacctcct |
| 96181 | tttctgcttc tggccaggcc tgaaggggtc aatgaagggc aaggagaagg caagggctgc |
| 96241 | caaagaggag aagaagaaga aaactcagag ctctggctct ggccaggggt ccgaggcccc |
| 96301 | cgagaagaag aaacccaaga ttgatgagct taaggtgaga gcctaggagc agacccttct |
| 96361 | agggtgtgtg ggggcgggaa gaggggggcg cagtgatcct gcaggtgggg caggacaaaa |
| 96421 | gccagagacc aggcagccgc cccctaacag cctggtctgt ctcaggtata ccccaaagag |
| 96481 | ctggagtccg agtttgataa ctttgaggac tggctgcaca ctttcaactt gcttcggggc |
| 96541 | aagaccgggg atgatgagga tggctccacc gaggaggagc gcattgtggg acgcttcaag |
| 96601 | gtcaggccag gagcacgggc ccagcctgag cacccgccag cccttgcccc ccccacaggt |
| 96661 | tcccccactc acctcccacc actgccccgg ccactgcctc cagaagccct ggactctccc |
| 96721 | atgactcagc agttaaaggg tgaaggccct gccacatcag ggtccagccc tcctggtgct |
| 96781 | gttagctatt ttgaatgcca cccttgccag gcaaacctac accctgaccc acatttgtct |
| 96841 | tgcccagggc tccctctgcg tgtacaaagt gccactccca gaggacgtgt cccgggaagc |
| 96901 | cggctacgac tccacctacg gcatgttcca gggcatcccg agcaatgacc ccatcaatgt |
| 96961 | gctggtccga gtctatgtgg tccgggtgag actcccgtcg ctttccctcc ttgcaagtct |
| 97021 | cctcatcctc ccatctggga gagagcaaag aagctgcata ctggccaggt gcaatggttt |
| 97081 | acgcctgtaa tcccagcact ttgggaggcc aaggcaggag gatcacctga ggtcaggagt |
| 97141 | tcgagaccag cctggccaac atggttaaac cccgtctcta ctaaaaatac aaaaattagc |
| 97201 | caggcacagt gccacgcacc tgtaatccca gctactgagg aggctgaggc aggaaaatcg |
| 97261 | cttgaacctg ggaggtggag cttgcagtga gctgagatca cgtcattgca ctccagcctg |
| 97321 | ggagacagag cgagactctg tctcaaagga aaaaaaaaag aagaagaagc tgcatactga |
| 97381 | cagccccaga ctgggaggca ccagggagat catttggtct agtctttatc ttttctagag |
| 97441 | gaagaagtca acgcccagag aggggtagcc acttgcctag ggtcacacag caagcctcct |
| 97501 | gaggggtcca gtgctcctgc ccctgccctt cactgtcata ggaccctcag gcagcctggc |
| 97561 | aggggcactg aagatgagca gggcatggga gcctgctcag gcagcccttc tccccattcc |
| 97621 | aggccacgga cctgcaccct gctgacatca acggcaaagc tgacccctac atcgccatcc |
| 97681 | ggctaggcaa gactgacatc cgcgacaagg agaactacat ctccaagcag ctcaaccctg |
| 97741 | tctttgggaa gtaaggcttc ttggtgccct cccctgccac acccctactt ctccaaccca |
| 97801 | gaacacctcc caccctagcc aatccttaag cccttctcct aactccaccc caccaggtcc |
| 97861 | tttgacatcg aggcctcctt ccccatggaa tccatgctga cggtggctgt gtatgactgg |
| 97921 | gacctggtgg gcactgatga cctcattggg gaaaccaaga tcgacctgga gaaccgcttc |
| 97981 | tacagcaagc accgcgccac ctgcggcatc gcccagacct actccacgta tgtggggcat |
| 98041 | ggggcagagg gcgggggcag tgtgcctgct ttgcctccac tctaaaatga gattcagatc |
| 98101 | ctggtgattt gagaggttag acattgtggt ttctgtccca ggccaggcct ctgcccctac |
| 98161 | agtccctggg cacagtcttc aggggacagg actgcagatc ccaaaacaag gagagggaca |
| 98221 | gtggattcca ggacagagga ggcaggacga ggagagacaa gtgggctagg gaaggtgggg |
| 98281 | gctagcaaga ggaggacaga aagagtcccc tggggatctg ggccagctct gccacttata |
| 98341 | ggctgtgtga ccctggccaa gtcccttcac ctctctggtt ttcagtttcc tcatgggagt |
| 98401 | ctctgaggtt ccagaggagt gggcacagtg aggggatgca gtggggctag gctggggaca |
| 98461 | ctgatatgtg gtccaaggcc cagggcagga aggttcagcc tccagcagcc ctagtgtctc |
| 98521 | aggtgagcct ggggcccagg gcaggaggaa tcaggctcac ttgctgatga gggcaacagc |
| 98581 | caactttaga gaactggcca cgaccagctg tcatccagga tggcttagtc ccacccagcc |
| 98641 | cctccaagcc tgtgtgtccc ctcccacaga catggctaca atatctggcg ggaccccatg |
| 98701 | aagcccagcc agatcctgac ccgcctctgc aaagacggca aagtggacgg cccccacttt |
| 98761 | gggccccctg ggagagtgaa ggtggccaac cgcgtcttca ctgggccctc tgagattgag |
| 98821 | gacgagaacg gtaatggggc actggatgca gccgcctgcc ccctctccag ggggtttcag |
| 98881 | aggccaggag gggcccacac ttccctgggg aacctcacag cctagcctgg ggtgtcctca |
| 98941 | gcctaaacct ggtcttagtg accctctgct catcacccca gagccccgtt cctgtctgcc |
| 99001 | cagcctctgt gcttccaccc ctcctacagg gcagccccac ctgctttctc tctgtccaaa |
| 99061 | tcccagtgag gtagagaggc tatctgcatc ccattctgca gataaacaaa ccaagatcct |
| 99121 | acttctagtg actcgcccaa ggtcatgtgg ctctttagag gcagagcgag ggcatcggcc |
| 99181 | caggtccatc tggctctaat ccttaaactc tccttacttc tctgtccatg aggcacttcc |
| 99241 | cagagaagca gagaattggg aggtgtctgt gctggtatct gatcactttc aggtgctggg |
| 99301 | acaggaagtg gattctcccc tccctgaccc ttctctcagc ccagcagggc tctccagtca |
| 99361 | acttccccaa gcagaggacc aagggcacag acctctcttg gccctgtggg gcagctgaga |
| 99421 | ccctgggcaa gccacttctc cttctgtgcc tcagtttccc caacagtgaa aaggaggtgg |
| 99481 | ggtagacagg tgatggcata gaggcttctt tgtgctccta agtccctagt cccagcaaag |
| 99541 | gtcttctggt tctgctgagc catgtgtgca gctgagccgc cggcacccac aggtcagagg |
| 99601 | aagcccacag acgagcatgt ggcgctgttg gccctgaggc actgggagga catcccccgc |
| 99661 | gcaggctgcc gcctggtgcc agagcatgtg gagacgaggc cgctgctcaa ccccgacaag |
| 99721 | ccgggcatcg agcaggtgac acttgcatgg ccaagactgg ggttcttggg tattggggac |
| 99781 | cagggatccc caacctgagt cagtaaaggt agaagccagg cctcacgctg tccgctgcat |
| 99841 | tccagaaagc ctggcaggca ccttcccacc aaggcccctc agggtaactt gaatggcaag |
| 99901 | ggtctttgct ttgagtgaga attacatcag ctcaggcaga gacctgggtt gtctccctca |
| 99961 | gaagctgtga ttggctattg gtgacatcat aggaattcct ggcatccaaa gatggaaact |
| 100021 | gatgaactgg gtccttgaca gaacaaaggt taggagggag aggagagctg atcttcctgg |
| 100081 | gcagagggag aaggccctgg gagatctgcc acaaccctct tcctcagggc cgcctggagc |
| 100141 | tgtgggtgga catgttcccc atggacatgc cagcccctgg gacgcctctg gacatctcac |
| 100201 | ctcggaagcc caagaagtga gcggcctggg gcccagcgct actcccttcc ggcccacccc |
| 100261 | acccacttcc caccacggcc caacccttcc tgcggggggc tcaggtccag atggccttgg |
| 100321 | ccagttggca tccctggggc ctgggtgtgg ccactgggcc ttatagggga gaaactgacc |
| 100381 | aaccaatcga tagagtttag ggcctgccct ggagagtccc cacgtgctaa ggcaggacaa |
| 100441 | cgccttccac cctgcatcag tgagcgagac aagccccaca cagcacactc cggtgcattg |
| 100501 | tatctacacg gtctacgcgc ccatacacat gcatctcatg cacacacaca cacacagcat |
| 100561 | agcactccca cggacaccca cacacatgcc cacactgacg cactccttca caacacacag |
| 100621 | aacccctggg agccggccct gcgtcatcct cacatccagg ctagtgtgat gttccgccaa |
| 100681 | gttttctttg gagtgcctgc cagtgatgaa tccaggagtg agtgcctgga agaggcagga |
| 100741 | ggtggtagag tgaaaagaac ccgggtttcc catccataaa gcggcaggtt caagtccagc |
| 100801 | tgtcagacag tgactggatt cagggccagc ttcagggatg gaggaagcca cacagggtcc |
| 100861 | cactcttgtt tccatgctcc tatgttgcca tcttgaaatt ctttatgaca agtgaccctg |
| 100921 | catttccatt tggcgctggc cccagcaaat catgcagcaa attctgccag gaatgtcctg |
| 100981 | gaaacctgag gccatgagtc agctgttcca gggcctgtca ttagggggca cccaactcac |
| 101041 | tgggccactc tgggctcgca gccctgtctg caatcccagg agagccatgc tcagatcaat |
| 101101 | ttttagtgaa tgactcagcc tcactcttaa tgattgaaat gaactacatc attcataatt |
| 101161 | acaattaaac cttgagggga aaatcctctt tggggacagg gacatacagc ttccatgggc |
| 101221 | ttccattgct ggctactggg cttaaatgca gacttctctt ggaactagca tctgagacag |
| 101281 | agggtggctt cctcccctca ccccaccccc accgcccaca gccatgtgcc tggtgggcct |
| 101341 | tctcactcat gcctctgctc ccccaacccc aaaccactcc tccagcccca gcctggccca |
| 101401 | ggccctgtgc tgaccccaag accccagggc ttctctccgc ctgccccatc ccagccctgg |
| 101461 | caccctggca taacccccac ctggggctgc taaccagcct tctctccctg ggcccaggta |
| 101521 | cgagctgcgg gtcatcatct ggaacacaga tgaggtggtc ttggaggacg acgacttctt |
| 101581 | cacaggggag aagtccagtg acatcttcgt gagggggtgg gtgagcagtc cctgcatggg |
| 101641 | agggactgag ctgggtgggg cttgcttccc ggggggcagg agaggaggca gagggaaggt |
| 101701 | ggctgtgggt gggagaggcc ccaccagcct ggctgcgggt ctggagatgt ggcgcccaca |
| 101761 | ggtggctgaa gggccagcag gaggacaagc aggacacaga cgtccactac cactccctca |
| 101821 | ctggcgaggg caacttcaac tggcgctacc tgttcccctt cgactacctg gcggcggagg |
| 101881 | agaagatcgt catctccaag aaggagtcca tgttctcctg ggacgagacc gagtacaaga |
| 101941 | tccccgcgcg gctcaccctg cagatctggg atgcggacca cttctccgct gacgacttcc |
| 102001 | tgggtgcaga gcagggcagg gatgggggtt caggatccag aactgagaag aggcaggggc |
| 102061 | cgggttggcg gggacaggga gagccctgcc ttggggggac aaggggtcat tgcttccagt |
| 102121 | ccatcagagc caggggtgtc cgacggggtt ccgcccccaa ggacccacct aaccgtccct |
| 102181 | aggcagatgt tctcagtgtc ataaccaggc tgacaacaag ctttggacac accaaggagg |
| 102241 | gggcagtcag tgatgatggg ggaggggaga ggctccctaa gggagtcggg aaacctccct |
| 102301 | gggcctcagg ttgcttctct gtaaagcagg gattctccct aaaactctaa tctgcatctg |
| 102361 | caaaagcttg tgggattagc aggactttga cagaatggat gcatggcagg gagtggcagg |
| 102421 | ggagacccca ggagagaccc tctggggtga aagaaggacc tgagtaaagc atgggggctg |
| 102481 | gggctgccta gcaagcccac gaggatgcct gcattgaggc cagttgctgg gagtgaggca |
| 102541 | ggaggatgag atgtgggctc agggaggtct gcactcagca aacaaggggc cgaggagccc |
| 102601 | agacccccac ccccaccccg ccccacccca gccctgttca ctctgagctg acactgaggt |
| 102661 | tgccacaggg gccatcgagc tggacctgaa ccggttcccg cggggcgcaa agacagccaa |
| 102721 | gcagtgcacc atggagatgg ccaccgggga ggtggacgtg cccctcgtgt ccatcttcaa |
| 102781 | gcaaaagcgc gtcaaaggct ggtggcccct cctggcccgc aatgagaacg atgagtttga |
| 102841 | gctcacggtg cgcacccctt cctgctcggg cagtaggcag ggctgggact ggctggggtg |
| 102901 | ccaagggccc agcacgcagc ctggacgctg ggacctgtct gtcctctgca gggcaaggtg |
| 102961 | gaggctgagc tgcatttact gacagcagag gaggcagaga agaacccagt gggcctggcc |
| 103021 | cgcaatgaac ctgaccccct agagaaaccc aagtgagtgc cctgccggcc cagcccctcc |
| 103081 | ccactctggc tcttggaggc gctggaacag gaaggagacg atccccagac accccatctc |
| 103141 | ttcctgggcc acagcctcat tacaggggag cctcctccct gccctctgcc aaccctgaat |
| 103201 | cccacaacgt ccctttgaac cagaggatgg gctaggaata ctggagagca ggaccttccc |
| 103261 | tgggaaaggc cccatctagc ggagagaaac tatgctcttc ccttcctagc ttttgcagaa |
| 103321 | gagccagctc cagtggtggc ctctggggcc atggccagcc ttgatggcca gaggggtgcc |
| 103381 | tagaactgca cacacagccc aggacagctt ccctcttggt cttggcccct cgccacaccc |
| 103441 | aatcccttct cctccctgtc cctcctctgc gctctctacc cttcatactc cagccggccc |
| 103501 | gacacgagct tcatctggtt cctgaaccct ctcaagtcgg ctcgctactt cttgtggcac |
| 103561 | acgtatcgct ggctgctcct caaactgttg ctgctcctgc tgctgctcct cctcctcgcc |
| 103621 | ctgttcctct actctgtgcc tggctacctg gtcaagaaaa tcctcggggc ctgagcccag |
| 103681 | tggcctcctg ggtctgatat ttcttacttc ttcctctgga ccaagggcta ggcaggcgcg |
| 103741 | tgcacacaca cacatataca cgcacacatc cacaaacaca aatatgcata catgtgcaca |
| 103801 | caaacacaca caagcatgta tgcacacatg tgccacgcac aagtgcatac acatgcactc |
| 103861 | aagcacacac aggcacacac ttaagcccac acaaacatgc acagcaactt tcaagctttc |
| 103921 | atgacagaat agactctcag aactagaaat gactatttta cacttttcca cattaagcca |
| 103981 | aagaggtgaa gtagcttgct caaggttacc cagcaaatta gggtagagcc gggactcaag |
| 104041 | ccaaggtttc caaatttcca atcctgtgtt ctttgcacac cacctctgct cccagccatg |
| 104101 | tttctcccag actgtaaccc aatttttttt tttttttttt ttttttggag acagagtctc |
| 104161 | gctctgtcgc ccaggctaga gtgcagtggc acaatcttgg ctcactgcca gctccgcctc |
| 104221 | ccgggttcac gccattctcc tgcctcagcc tcctgagtag ctgggactac aggcacccgc |
| 104281 | caccacgcct ggataatttt ttgtattttt agtagagacg gggtttcact gtgttagcca |
| 104341 | ggatggtctc gatctcctga cctcgtgatc cgcccatctc ggcctcccaa agtgctggga |
| 104401 | ttacaggcgt gagccaccgc gcccagccga ctctaaccca atttcattgg cagaaagaag |
| 104461 | ctgagctatg gacagggaaa agggaagggt gtggccaggg ttagccaaca ggtctggaaa |
| 104521 | tggctctcac ccgtgtgtga cctcccagtc cagggctgtt gttttctgcc cttcaggata |
| 104581 | ataattccat tcaactcaaa catttcatag ccaccatggc ctgaacaccc aactgcaggt |
| 104641 | gctcagagct ccccaggcac tggctcactg tgccattgcg ccaaacccag gaggtaggta |
| 104701 | ctgcttgtaa ccccatttta tacatgaaga aaccgaggtt gatagaggtg cctcacttgc |
| 104761 | ctgtgaaaac cattcaaaac caggtgccct gcacccaagc cccggctctg tgtccccacc |
| 104821 | aatactgagc tcagctctgg ggctgcacgc catgtcctct gggaggcagt agtttgaaaa |
| 104881 | tgcatatgca gtactttcac ttgtatcttg acattttaca aaacctattg tttttataac |
| 104941 | acaaacgaca gatagtgagg ctggccaggt gcttctcggc tgggaggctc tacagaaggt |
| 105001 | ggagtgggtc ttcatcctga gagtgggcag gtcggtgagg gcagcttgca ccccacaggg |
| 105061 | gctgctcaga ccctcagcag ggcccggtgg gaacagccat ttatgtccat cagaaaggaa |
| 105121 | gaggttgtga agcaccagtc ttaccaagga cgtggggcag cacatagaac gagctaaccg |
| 105181 | caggagcttc ctaacgatga gaactgcctg cagggccaag gctgccccat gctgcaagta |
| 105241 | gctcccatct aggccttagg aggagattcg ggccccaaag gtgctgcagg gaggatagag |
| 105301 | ttttgtaagc agcaagtcgg gtacttagaa atgggtttaa accctggctc cagcattcac |
| 105361 | tgcttttggg gctggggcca tggcagggct tttgggggtc cagaaggaca gaggatgggg |
| 105421 | tgcactggga ggcagctcct gcccactggc tgaccggctc ctctcttcca cttcccagcc |
| 105481 | ggcccgacac ggccttcgtc tggttcctca accctctcaa gtccatcaag tacctcatct |
| 105541 | gcacccggta caagtggctc atcatcaaga tcgtgctggc gctgttgggg ctgctcatgt |
| 105601 | tggggctctt cctctacagc ctccctggct acatggtcaa aaagctcctt ggggcatgaa |
| 105661 | ggccgccagc tcccgccagc cgctccccag ccctgccgca tttcctttca gtggcttgga |
| 105721 | ctctttccca tctcccctgg ggagcctgag gagcccagcg tccactcttc atgccttggg |
| 105781 | ccgagcctgc ctcctgcttg cgggggccgc ctgtcctcac tgccccaggc tgcggcttgc |
| 105841 | ccagtcccgc ccctctgacc cctgcctgtg ggctggggag ccttggatgg ggtggggacc |
| 105901 | tggaatgggt ctctcttgcc ccacctggct gaggcgccac ccttcttcag gcccaggctc |
| 105961 | cagaggaaga ctcctgaaac cctccccagg tcttccaagt acaggattga agctttagtg |
| 106021 | aaattaacca aggaccatgg gtcagtgccc agggctttaa aaagaatgaa cgagcaaaag |
| 106081 | gtatccccgc cgtgacccct gcagatagca ccggtctttg atccgcagca ggggccagac |
| 106141 | cctgcccaca agtcccagcg cggctgcttc tgccactgct gggctccact tggctcctct |
| 106201 | cacttcccag ggggtcgcct gtcctgcctg tgggtttcca tggcttccca gagctccctc |
| 106261 | tgccccagcc agcgcctcca ggcccagctg aggagctgtg agaagcagca gaggggactc |
| 106321 | cccatcccgg gcacaccctg tcctcccacc cctgccccct tgcccttcca gccctttcag |
| 106381 | ctgcagctgg gagctggccc gtcaagtgct gcccctgcct gtgtctgggt ttctgttggc |
| 106441 | tgtttttctt ttcttgagtg gtgatttttc tctaaataaa agaagtcaag cactgagctg |
| 106501 | acaggtctgc actggtcaag ctgagaggag cagccgcagg tgcggggcag aggcagcagt |
| 106561 | tctctaggct ggcagattca gtaccagcag ggctcccatg gcctttcccc ttcaagtggc |
| 106621 | ctctggtggc ccagggttca aggcaggcct caggcacagg gctgcccacc caggctgccc |
| 106681 | acaggaggag tcttacacca tagcccaaag ggcacaccag cctgggccca ggggccccca |
| 106741 | aagcaccgaa agaatccttc aggtctgggg ccagtctgaa ggcttaaggc cccacaaggg |
| 106801 | cccaaaagct ctagcctcca cccacagaaa ccagttcccc tgaaagcaag aaaggagccc |
| 106861 | cacgctactg gcctcggcct ctgactcaca ccactatctg agcctggggc aaagtcccct |
| 106921 | catgacacag aggtaggggc aagggcctgg tcttgctaga cctgacctct ttaaagagat |
| 106981 | tcagccacaa ctttaaaagg ctttaatcat aatgcaggac acaggtaact cctctggctc |
| 107041 | cttatttcga caggctataa agacagccct ggaaaatcca gagagcaggc ccaggtgcgg |
| 107101 | cccagtgggt gatatgagct ggctccggca cagacaccag catcaggcca gccctaacac |
| 107161 | atcagccttt ggcggtccag ctcattttgt gggtacccgc aacacctgag tgggaggaac |
| 107221 | ttgcagttca gagttgatct ggaaaagaaa gggtgaaagt cgttacattt ttcccagggc |
| 107281 | cctccttctt tgccaccctt gcgagccacg ctggctctcc catgggcctc caaagccctg |
| 107341 | cacgcatctc ctctccaaag ctgagagatg ctgaacaccc acagactgcc tccctgcagg |
| 107401 | agacacgcct gagccttctt gctcagcttc tgctccagct gtgacctctg gtagcgttct |
| 107461 | tcatctcccg cccgtccatt ctctgcagtc ttcccctctc ctctctccac gcacccatgc |
| 107521 | catccccaat ctagcctgcc ccacctcttc ctcccccagc ctcttgtata cagtagcatc |
| 107581 | tgtggaagcg ggaaccatac cgtccagaat gtctgggtcc tgtcacaggc caagggtcat |
| 107641 | tatgaggcca aggttcacta caacatccca ctttcagctg tggcctggga cctgggactg |
| 107701 | tgctggggcc acgcagcccc tgtggctgga cttggagctg gcctcagtca cctcacacgt |
| 107761 | gtgcaactaa cagctgcgtc acgaccttcc tggcctacag ccccagctgc aggtgcccac |
| 107821 | acccgcagag caggaaatgt cagcaatgga ctttttcctt cctcctcttg ccaggccatg |
| 107881 | gggaagttgt ccacaactat tgcagggttg ggcacagatg ggggccaggg aatatctgcc |
| 107941 | ccagcagagc ctccttcccc atgcgaggat gaccctccag tcatatccca ggcagggaac |
| 108001 | cggggctggt gggtggaaag agcccaggct ctggacgagt tgcaaactct gcaagttgtg |
| 108061 | attgtccttt gtgtgaaatg aggagcattg tttccgccct gtccacctca cacagcgggt |
| 108121 | gtgaggatgg aagaagagag cacagctgga ggctctgtag ctggggagct gctcctggct |
| 108181 | gtggcactgc ttcacacaga gcagtcccag ctggccactg gcaccagaaa ccacagtatc |
| 108241 | aaagagacac tgtcacacct gagctgtcct ggaggagact tcaggcaaga tctactcctt |
| 108301 | tggccagtag ttgtctcaag gtgccactct tgatttttta catcatatca caaagctccc |
| 108361 | ttgcctctga cggggagggg actcctcgtt ccctaatccc agctccagtg cccctgcccc |
| 108421 | acccgtgtct cccgctgccc ctccttggaa ggccccgccg cccaccttgg agttcagata |
| 108481 | ctgctgcagt agcgcc |

### Norrin Cystine Knot Growth Factor (NDP)

[0134] The NDP gene encodes “norrin cystine knot growth factor” (NDP). The human ND gene is located on chromosome Xp11.3. It contains 3 exons, encompassing kilobases (kb) (NCBI Accession No. NG 009832.1). NDP encodes secreted norrin protein that plays a role in retina vascularization of Wnt signaling pathway through (FZDA) and (LRP5) coreceptor. Mutations in NDP have been associated with Norrie Disease Pseudoglioma, an X-linked recessive syndromic hearing loss that is characterized by early childhood retinopathy. About one third of individuals with Norrie disease develop progressive hearing loss, and more than half experience developmental delays in motor skills.

[0135] Various mutations in the NDP gene have been associated with hearing loss (e.g., Norrie Disease Pseudoglioma). For example, the p.His4ArgfsX21, p.Asp23GlufsX9, p.Arg38Cys, p.Ile48ValfsX55, p.His50Asp, p.Ser57*, p.Cys93Arg, p.Lys104Gln, p.Gly113Asp, p.Arg121Gln, and p.Cys126Arg mutation have each been associated with Norrie disease pseudoglioma. See, e.g., Musada et al., Mol. Vis. 22:491-502, 2016; Chamney et al., Eye (Lond) 25(12):1658, 2011; Liu et al., J Chin. Med. Assoc. 79(11):633-638, 2016; and Parzefall et al., Audiol. Neurootol. 19(3):203-209, 2014.

[0136] Methods of detecting mutations in a gene are well-known in the art. Non-limiting examples of such techniques include: real-time polymerase chain reaction (RT-PCR), PCR, sequencing, Southern blotting, and Northern blotting.

[0137] An exemplary human wildtype NDP protein is or includes the sequence of SEQ ID NO: 20, SEQ ID NO: 21, SEQ ID NO: 25, SEQ ID NO: 26, or SEQ ID NO: 27. Non-limiting examples of nucleic acid encoding a wildtype NDP protein are or include SEQ ID NO: 21, SEQ ID NO: 22 or SEQ ID NO: 24. As can be appreciated in the art, at least some or all of the codons in SEQ ID NO: 21, SEQ ID NO: 22 or SEQ ID NO: 24 can be codon-optimized to allow for optimal expression in a non-human mammal.

Human Mature NDP Protein (NCBI Accession No. NP_
000257.1)
(SEQ ID NO: 20)
MKTDSSFIMDSDPRRCMRHHYVDSISHPLYKCSSKMVLLARCEGHCSQAS
RSEPLVSFSTVLKQPFRSSCHCCRPQTSKLKALRLRCSGGMRLTATYRYI
LSCHCEECNS
Human Mature NDP cDNA
(SEQ ID NO: 21)
atgaaaacggacagctcattcataatggactcggaccctcgacgctgcat
gaggcaccactatgtggattctatcagtcacccattgtacaagtgtagct
caaagatggtgctcctggccaggtgcgaggggcactgcagccaggcgtca
cgctccgagcctttggtgtcgttcagcactgtcctcaagcaacccttccg
ttcctcctgtcactgctgccggccccagacttccaagctgaaggcactgc
ggctgcgatgctcagggggcatgcgactcactgccacctaccggtacatc
ctctcctgtcactgcgaggaatgcaattcc

[0138] A non-limiting example of a human wildtype NDP genomic DNA sequence is SEQ ID NO: 22. The exons in SEQ ID NO: 22 are: nucleotide positions 1-87 (exon 1); nucleotide positions 88-468 (exon 2) and nucleotide positions 469-1719 (exon 3).

| Human NDP Gene Sequence (NCBI Reference Sequence: NG_009832.1) | |
|---|---|
| (SEQ ID NO: 22) | |
| 1 | aagatgctcc gtggaaggga gccgagcggt gggcagaggc tgagtccccg ataacgagcg |
| 61 | cctcacattt ccgtggcatt cccatttgct agtgcgctgc tgcggccgca cgcctgattg |
| 121 | atatatgact gcaatggcac ttttccattt gacattctct ctctctctct ccctctctct |
| 181 | ctctccctct ctctctccct ctctctctct ccctgtgtcg cttaaacaac agtcctaact |
| 241 | tttgtgtgtt gcaaatataa aaggcaagcc atgtgacaga gggacagaag aacaaaagca |
| 301 | tttggaagta acaggacctc tttctagctc tcagaaaagt ctgagaagaa aggagccctg |
| 361 | cgttccccta aggtaagcag gaaaacaagc gctgccggct tgcctaggaa atcgcttctt |
| 421 | tccaaaccga gcatttcatc ctcctctcag acaaagagac aacctttaaa taccacttaa |
| 481 | atttgcatta ctttaatttg cattaatctg tagcatgcta gcattgtgtt tcttaaatga |
| 541 | acgggtcttt gaagtctgtg acagagcagg gagcctccta gaaaagcttg aaaatatctt |
| 601 | ttggtttgac ttaaagagat ttttcttttc aaactctctg cgtagttaga tgtaactttg |
| 661 | tgatggttct tatagttgac cccgtgaaag ggggctgcga agcagcaact tgccaacatg |
| 721 | gattcatgga gcccagtatc ttccccagca ccctcatccc acttacaatg ggggcactat |
| 781 | taacgcaggc aagactgcga gtttaaaagc gcactgttta cttttattac tacttatgta |
| 841 | tgctgctgat ctcctgccag ggctctgccg gagtgctcag aatgacttca aacaataggc |
| 901 | aacatttatt tctagctttc tgtgtcacgc tttgcaggaa tcctgctccc ttgcactctt |
| 961 | ctttcagcgt gcaggtcttc gcttccatag atgcattggg gagcaccggg aggagatgag |
| 1021 | gatggattta ctgtatgatt ttgattgggc aaaaagtccg aggaaatgca tgctgtttgc |
| 1081 | cttggactta ttgcaggggg ttatttttag tcatcagctc gtccctgcag catgatgttc |
| 1141 | aaggagtgac cgggaaagga tgctcccacc agcacagaga ccaggacctg taggaatgac |
| 1201 | tcctacctgc gggatattcc gaggtttctt tcaaactttg gaatacaagt tctctcttta |
| 1261 | aatgaacaat tgagctgtag gaggcctggg cataactctt tcttggggga cgggaagttt |
| 1321 | gattgtgtac agaatgttaa tgactcagaa cgcccagtaa ctgaggctca ttgtaataga |
| 1381 | caaacccaga taagcctcca tgagaggcag actcccatct ttactgagat tcaggtgcgg |
| 1441 | gaaaggaagc tatttggcaa gatgggagtc ccttgtacag ttctttgtaa ctcattaata |
| 1501 | acagatatgg ctgctgtgaa acatgtctct tttcatttct aatattagtg tattttaatt |
| 1561 | acaaggagct ggcattggca aattacccca acacataaga ttaaatacca ggtgcatttg |
| 1621 | aaaacagaga gatgactgaa atggggagtt gctgtgggtg tcaaccaaat acagcgggga |
| 1681 | cggcacaatg cttctcaact gagcgtttaa accagatgca aatatctgct cattttcttc |
| 1741 | tcatcagtct tactaattca aggaaacttt atggtcctgt ttgccagttt tcattgcaaa |
| 1801 | ttggtacaca gtttatgcaa aacttttctg attttctctg ataaccagcc caataagcat |
| 1861 | cgctgaatga aaatctgata tttgaatagg ttaatttaca actttggggt attcattagt |
| 1921 | caagaaagcc ataaaagaca ctatggattc cattgctgta aaattttatt gtaatttttt |
| 1981 | tttaaaaaaa ctgcggttag caaagcattt agctgaatca aaacaatttt cttagactat |
| 2041 | tattcagatc attacatgag agtatttgaa cacaaaatgc aatgttttgc atcatttatt |
| 2101 | ttaaaataca tttggttcag gtaacgggag aactggctga ggccttctta cgactgtgta |
| 2161 | ccaagcagct gacacccaca gatggaaatg tgcctgtgga gttttcaatc ttaattcgag |
| 2221 | ttccaatgac actgtcaagg gaaaaataaa tcatttttca atacatttaa caatttccaa |
| 2281 | ctcatttatt ttcctgggcc cttgaaaaat gtggtgagtt tcttggaatt atagccacca |
| 2341 | atggtggcca gcaatcttta ttttaagaac tcacaattca agtactatta ttctctggtt |
| 2401 | aattatttat ttcatcaatt tttaaataaa tatttattaa gcattttcta gatgcccagt |
| 2461 | gctatgctag tcccgatgga tgcaaaggtg aatgagacat tgtcccatac tctaattctc |
| 2521 | agtccatatg ccatctctag ttagattttg gaactgaaat gggcattgcc aatgggtaaa |
| 2581 | gtgggcaata actttcctgt tataaagaat tatttaaaac agctactggt ttctagattt |
| 2641 | acttgaaatg attctcactc atcagtgggt tttctttcca tttatgatta agggattccc |
| 2701 | ctttggcctt tttcaccaga tcctgggtac acgtcatttg cacagctaac acggctagat |
| 2761 | ctttccagcc tgggtagaag aatcccggaa aaagacagta gtttatcctt tctctgctct |
| 2821 | cctgagcacc ctgtggaaag gaccatatgc tgtctctatt ggggatgggt gtgagtcgcc |
| 2881 | tactcagtag ctaacatcag ggccacttga tgaatcatcg aattagaaac atgcatatgg |
| 2941 | aggaagatgc agtcactatc cctcaccact tacttgtccc acccccagta tcaaaacaaa |
| 3001 | tgacctctgg gcctggccta aattcaagag gcccctggga agaagctgtt ggaaactctt |
| 3061 | ccccaaaccc aggtctccat catagccaca cagtgttgct ttcaaataac ccagtatggt |
| 3121 | gttttatcac gtgtttaggt tactggggga aaaaaaaaac cctgaaaaca gcatcaccag |
| 3181 | ggtccttgac ttggtcctta tcagcagata atcccccgtg gttggattaa aatgcctctg |
| 3241 | actccctggg gtgcctgact caccctagcc agccctcagc ttcttggcca gcggccttcg |
| 3301 | agcccatcct cacctcttcc catgacggcc agtgactgct tctttgccca ggccctctgc |
| 3361 | actaggccag cagccagtgg gagcagaggg gatgggaagg caggtggaca gactgtgaag |
| 3421 | tgctaaggca gagcggggaa gcagggctgt gagacagggt gggtgagctc cagggcctgg |
| 3481 | gttgctgtgg cctgccctgg ctgtgatcag ctgtcatttc ctctttgtgt atgacactgt |
| 3541 | ggaacatatt aaaatttctc tgggatggta tgtttggaat tcctctgatg ccccacctca |
| 3601 | ccaacttacc cggacaataa aagcaaggtt gtaagccttt gaacagctgg ctggctatat |
| 3661 | atttcccttc tttctttcgc ataatctaat tcagaaaaga atccagctag actggcagtg |
| 3721 | ccatgtctgg gtacttgttt cctgcaagtc cttcctcctc cacctcctcc cgccagtcct |
| 3781 | ggaatcttcc tgggtggcat gtggcttttc ttttcttttg ctcaccactg ctcccagccc |
| 3841 | gccccctttt cccttcgcct gagctccttc ctttgtcagc tggctctttg ctctgcctgt |
| 3901 | tttccagaca gcttgggtcc tgttccatcc ggggagaaca gcccatggga tctccccatc |
| 3961 | tccatagtat tcccaggatg tcattcttgg caccagctct gccgggctga taggactggg |
| 4021 | gggctttttg tagtcccgag cctgaatcca ctcacagaga ggagcagcca catggcttag |
| 4081 | ctgccctttg ggctgccgag agcggggctg gagtgaccgg gttggcagga acgagcatac |
| 4141 | catcacagtg acccgaacat ctccggcaaa ggccttgggg tgggagcgct atgggaatgc |
| 4201 | ctggatgcac ttcggcctac attaagagaa atgtggttat tctctgtttc gggggagaga |
| 4261 | caagcggctt gaaacaaagc cctctggatc cttggcccct tccctgcccc ctttcccggt |
| 4321 | ctgtccttcc cacatccctc cctccccaaa cagaaagaaa gagagacagg acttctaatt |
| 4381 | tggccagcac agacccgaat gtctttatga aacccattta gtgaaagaaa gaggggagaa |
| 4441 | atatattctg ggttgatccg aactaaaaaa tgcatggggc tttggagatg gggcgggatt |
| 4501 | ttttctttct ttctttctgt ctcttaagag cagaacaaca gtttcgttga tgagttgcaa |
| 4561 | atggaaggaa gtggacctct caattagaga ttcccattta agagcctcaa tgtaaacctc |
| 4621 | cctgtgacat ccttaaaaga tgctgctaat gtccctggga ccaaaaggta ttaaacagca |
| 4681 | agccaccagg cggcttccta ttccttttct ttttctgggg gctttggtcg tctttttcaa |
| 4741 | attagctaaa attcattaaa ggacccaaaa ggaaaaattt aaagcagctg aattaaaatg |
| 4801 | agtctttccc tgttagcctg acaagaagaa aaaaagaaag gaagaaaggg aaagaaagag |
| 4861 | aagaaagaac caattcccct ccactaccac ttcttgggtt ttaatatgaa ttattccata |
| 4921 | caagtcccta ggctagagga tctatttaaa gacgcctggc agcatgaagg gagagggtaa |
| 4981 | aaatacaacc actcttttgt ccatcaaagg ttttctttgg gaggacatta agagcattcc |
| 5041 | tgttttcttg tctgcccctg ccagtggcaa tgttccagct ggtagtatcc actcctcgcc |
| 5101 | catcaggtca gcaatcatga acttctgtgt ttaatttcag gagaaaacaa agggtgggaa |
| 5161 | atccttccga aacccctatg tgtgtgcagc agggcagggg aggctggaac tggaatcagt |
| 5221 | actctcttgg ctgtgcaggt tgcatgctgc aaattcacac acccacacag ttgagttgtt |
| 5281 | gaggaagatt gtgccgatgg cattatttct gatgccagct tcccttgcat ctgcaaagct |
| 5341 | tttttcttgt gtctctggca gtcatttgct tgtcaccatt catgtgcact gtccccttca |
| 5401 | tcagaggttc tcagagcctg atggtcaagg atatgtcact agagtcttac ccccagaccc |
| 5461 | attttcaaca gtaagaacgt gaaaccctgg atggggtttg caatctgaag caactacttt |
| 5521 | cttgttagga agagtgctga ctcagaaaat tcaaagaatg ggtaacttcc gttggcgaca |
| 5581 | tatccccagt gctcataatc aggaattcat ccagttgggg tccatttcac cctcatggca |
| 5641 | aaatctggac ataaacattg actagtagct ttaaactggg tataagattt gcaacagata |
| 5701 | acatttttgt cttttctttt ttcttttttt tttccacaaa agctaagaat ttttcagaca |
| 5761 | atttgctctc ttccaaggcc tggatcaatc ccaacttttt cttttaagcc atgatccaac |
| 5821 | caattgcagt atcctttaaa aatgaaaggg caacaggcta agacattcaa gaaagttgat |
| 5881 | aagcbgtcag aaaatgctca agggtggcct ttctacagtg ccacaaacca acaacagccc |
| 5941 | taaacgtgga gtcctcttcc atcctttcat cagtagggaa taaaaatagg gagagagcag |
| 6001 | gtcaggggag aagtaacaaa agagaagtaa gaaggattat ttttgatgtt caaaatctgc |
| 6061 | tgctgccctt tcaatatttt caaatatcac aatttcagaa agggaaggat ccctttattt |
| 6121 | cacccactct ccctcccagg aaggtgtttg aagttgctgt ctttacctga aaaggaggtc |
| 6181 | aactcctcaa gtgaaaaaac atcccctatc ttcaactcga agtaaaatgg aggtacacac |
| 6241 | atttgtacct aattatgtgg gtacaaatat aatttgtatc cacaaactat aaaggatgta |
| 6301 | aagaatcaaa gaaatccaat ccttaatcaa agtccaattt ttctttaaaa cttgagagga |
| 6361 | tattttaggg ctcattgcat tgctgtgatt tcactgcccc ccaccaaatt atgaaaaatt |
| 6421 | actccttttc agaatttaaa tttttctttt gagatgtgga atccaaaggc agcagaatag |
| 6481 | tattgttaca gggaagctgg cagtcaaaag acatagacat agctgcagca tgcatggttt |
| 6541 | aagcaaatca agacaagcag aaaaccacca ccccaacaag ttcagggtta tcagcaatat |
| 6601 | agggacacgt atttttatgt gatttttatg agaaccttgc ccctttgaca tatgtctgag |
| 6661 | tctaggagca ttccggattg caacgggatt gaattcagta ttcaaatccc accattgggc |
| 6721 | agaaaaggca aattgaatgg ggaatggaaa gactgagttg ctcctattgt ttatgcccca |
| 6781 | ttcctaacta agggctctac agctgttagg tgagatcact acccaccatt ccaaagtgtt |
| 6841 | gttgcjggtg aggaggttca aacgcagctt tggaaacact ttgctgcact ctttgaagaa |
| 6901 | aggccaacat gctcatttgg ctctagggta aaagagagcc tgtaccctga gctaacattg |
| 6961 | gtcacctctc ctcctgaggc cataccacag ccagcagtac agcagcagaa caagtgttta |
| 7021 | gttgtttcag cacaggtatc cccagaacac ctggcacctt ttcttttcca cagggagaat |
| 7081 | gtacattcat gcattttggc aagactgagt cctctgagtt gggtgtctcg gaactctcct |
| 7141 | attttccttc taaagggtct tatgtaaggt gagcagtaga gbitgtctca ttcctcataa |
| 7201 | aaaatcccct tcctgggagg gagtgggtga aatgaaggga tccttccctg actgaaattg |
| 7261 | tgctatttga aaaaattgaa agggcagtgg cagattttga acttcaaaat gaatccttcc |
| 7321 | tcctcctcct cctcttttgt tacttctccc atgacctgct ctctccctac tttaattccc |
| 7381 | cattgaagaa aggatagaag aggactctgt gtttagggct actgttgatt tgtggcacta |
| 7441 | tagaaaggcc acccctaagc attttctgac agctcatccc catctcagtc acagctttta |
| 7501 | tttgggtagc tggatttaca gaaataatca aatccctaga ggaaaagact tcaacagaaa |
| 7561 | agtacctcct gacacttggg taacctgact tggtcatttc caatttatgc aagatttgta |
| 7621 | ttctaaaagt caattagtta tgtcaactgt taaaaactca gaatgagtct ttccattctt |
| 7681 | cagaatgact cttttctgat tatctgtggg ccatagaagc ccacagatac tcagcacagg |
| 7741 | atccaagtgc cataccaagt ggtcaactct tttagacgta agtctcagcc cagggcttct |
| 7801 | ggaatgtacc tcccctagca gagaagctct gtagtagata ctttaccaag cacagggcct |
| 7861 | cgctcttgac cccaagacta ctgattctac ttgcagagaa gacaactttt ctaatcaatc |
| 7921 | tttctcttct atcctgaacc agagtatcag agattgtccc attagggcac gaggatctgt |
| 7981 | ggctcaagct cagttaagaa ataagcgtct ttcaaaagaa aggtgcaaga gggtggaact |
| 8041 | cagcctatat tgtcattatc aaatgcaaga agtctaatcc tagcatgatt tattaatatt |
| 8101 | agcctttctt ctctccccgt ttatgctttg gtgggtactg gacagaaacc ccacaaattt |
| 8161 | taagacagtt ttaagagaaa tagtaactgg ttaaatatcc tcactacttc aaattattat |
| 8221 | tattattatt gatattactg ttaacttttg tttttttgag acagggtctc actctgatgc |
| 8281 | ccaggctgga gtgcagtgat gcgatcacag cccactgtag gctcaaccac ccatgctcag |
| 8341 | gtgatcctcc cacctcaacc tcccaagtag ctgggatgac aagcgtgtac caccatgcct |
| 8401 | ggctagtatt tttttattat ttttgtagag atgaagtctc cctgbittac ccaggatgat |
| 8461 | cttgaactcc tgggcttaag tgatcctccc aacactgcct tctaaagtgc tgggtttaca |
| 8521 | ggcatgagcc gctgcacttg gcccacttcc tatgattaac aggatattat taatttagaa |
| 8581 | actatttagt acatggcaag cactcagtca aatggttatt aacggcbgtt tttatttcag |
| 8641 | gccaccaata tagcttcatc aaggggcaaa tacttatagc ttgggcttca gtgttggatc |
| 8701 | agacaccacc ttagaagttt tttgcaatca ttaactcctt aagtaagaag ggaactcttt |
| 8761 | ttgtaggatt gctttgggga atatgtagcc ccaaggcagg ggctgtactc tgagaagctt |
| 8821 | gggtagagtt ggagactgtt agaaatggat agacacataa aagcatttag accaatctgt |
| 8881 | tcattttgca gatgaggaaa ttgagtccta gaaaaggcaa gtgacttgtt caagatcaca |
| 8941 | cagccaatga tgggagggta ggactcaggg cttgaggatc agtttcagaa tgcagtgaaa |
| 9001 | ttgttatccc atatttcttt caaatcagta tagggacacg gaacactaac aacataggcg |
| 9061 | accaatgggt ctagggagga aaagatgaaa gctgtaggta agtgggagtt tggataacaa |
| 9121 | tgagatgttt ttctggagtt cctgacaatg cctgaaaaaa aaagtcagga ttttaagctt |
| 9181 | cagtcaggct caaggtcgag tcctcccact ccagtccctc ctcagacagt aaaacttttc |
| 9241 | aagccaagga catacatata ggtgggggca tttgacagtt ggctcatctc cccaccctcc |
| 9301 | aaattattta tatttctagt ccttcagttt agcactccta tttaccccag gattgtaatt |
| 9361 | cattgcctct ttccctggcc atattcctcc atcctttttg tttctcccat ctcttttctt |
| 9421 | cctccatcac ccccactgct gagcttggct acacttggct agtagtgcag gttgggagaa |
| 9481 | cacagagtcc tatcacagac tggaggacta ttatttaatc acaagaatgt tgtctttttt |
| 9541 | ctcctaaggt agcactctgg ggacggtcat tgctgtcttt attccctcac ccccccacca |
| 9601 | cccctgcact ggattagaca catgaaatgt gcctatctct gagatgaaag gagcaagaac |
| 9661 | tgcttcctcc ccactgacct tttgcctgcc catccttgga gatacctgga gttggcaggc |
| 9721 | tggaggccta gcagcatttg cagtcagtgc cgctgcctct gggtcagccc aggcttggct |
| 9781 | ccttggctgc tactgatgtg ctgccagcta ggaatattaa aaaccattca ttgaacgcac |
| 9841 | aggatgcttt ataaaatcca acatgcbgtt tacagtttat aaattaactg ccttgggaag |
| 9901 | aggcatttga cttattctcc aaggcatcta gttgactaga tccaattgga atcctttgag |
| 9961 | ttcctgggaa ggggctactt aacacttcac actttctaaa ttagacctag agtttcttgc |
| 10021 | ttttctgatc ctagtactgt atgaagtttt atctagggtt atctagcaag ctttcttcca |
| 10081 | cttataaatc tttgatgttt ttgcaatttc tttgatagag gctttatgtt ctactatctt |
| 10141 | cactttattt atgcttcata ccataatttt ttaaaaaatt acaataaata tcaagtaatt |
| 10201 | ctggctgata tactgactcc attccaaggt cattatattt tatttgctta acttggtctt |
| 10261 | cttagaaatg atgcaatgaa tactggatac aaattagatg ttcagagagt ttatcaatgt |
| 10321 | gtctaaaaac catccaggaa aacaacaggc caagactctg cctgcagagt cagtgagcta |
| 10381 | gaagagggat cgaggatagg aactatattt ttcccctgac cctatctctt atctgctaga |
| 10441 | gcaaaaggag acacacagta ggtgctcaat aaatacatgt taaaaaatat ttgttgaaag |
| 10501 | aagccacaga agggaatatc agtatacatt agtattgaaa acagcctagg gggaaatatg |
| 10561 | gatactgaag caccaccctc ctgtgcctgg caagcaaggc aagaataagg ccattcttgg |
| 10621 | cacataccac ttagcctgtt gctgagataa cttgcgtgaa accagcactt taccctctgc |
| 10681 | cagccagaag gtcagcccaa gagtgagctg atctgtgggc acaacaccat ctctcaccca |
| 10741 | ggaggcbjgg cccgctgtaa gctctgctat attatttccc tgaggatgac aggtggggaa |
| 10801 | atctgggcac cagttgttct tttccactgg tatcatttgg aaggtagctc caaagtcggg |
| 10861 | cacgccagcc tacgtgcctc tcctgccggc agaggctcca cattggagct attagaatgt |
| 10921 | gggctctgta cgtcjgccaa gtccatgtct cagagactgt atccagagca tagcgtggcc |
| 10981 | acagggctac tgagttcagc aagagagtca ttctcttgtt caatccatta ttgcctgggc |
| 11041 | caaggttcta agtcttcgta ggcagcattt gattttatga cacgtcttaa aaaattaagg |
| 11101 | caaactggaa ttaatttagt tttgagaaaa caacagaagc tgctacaagg cagagataat |
| 11161 | tctaggctgc cagaaagtgg tgatctcagt ggtgtacatt ttcttaattc ctgattttcc |
| 11221 | tctttgtgag gtcttcctcc cactcccata ctttgcacat tctcacctat gcacaccctg |
| 11281 | agcaacacaa tgttgacaac ttgacttagc attgctcttt tcttaagctt tgttttcatt |
| 11341 | tcttcttcaa tacaacagtg ttggttcatt caatttgaac actcaaggca aaaaaaaaaa |
| 11401 | aaaaaatccc aggttatgtt ttcagaatct tacctttttg tttttgtttt gagggttctg |
| 11461 | tgagttttgt ggcatattta cattgttgct tacattctta tttcagaatt taagataaaa |
| 11521 | actgggcaac aactctcacg ttttctgagt gtgttgaaat gaaaaatctg tttcttagaa |
| 11581 | ttaatggtaa agcaacattt cctgtcaatc tttcattctt taatattact tctgggttca |
| 11641 | gctcaccatc tctaaagaga aagccagatg atcaagttac attgtatgtg acattaacta |
| 11701 | tctctttatc tgtgtaaatg tcataatatc tgcttgcaaa gtgttttatt catttttagg |
| 11761 | aaaaaatttt aaactgtgct tgcaattcag gatggtgcta ctaggtggca gtaatgtaca |
| 11821 | agaactatgt ggtcgccctg gaagagtatt tgactaagag actagcatgc cttcccgtaa |
| 11881 | ttataagaaa taaaaatata atatttttaa aatactcaaa ctggcacaaa cagtaaacat |
| 11941 | ccattaactt agttaccata tttaagctga gcttttaaaa gagaaagcct tattttttaa |
| 12001 | tgaaatttta aataaagtat acattcacaa gctcaaaaat ctaaaaatac gaaaagatat |
| 12061 | atagtgaaaa gtctttctct catgcctgtc cctcaactac cacaggtaac taattttgtt |
| 12121 | agtttcttgg gtatcctttc agagctttgc tatacaaata tgtgttttta tctctctcca |
| 12181 | ttttaactca aatcaataca tagagtttct gcatccttcc atatatagtt ggttagtata |
| 12241 | ttgttgtgtg aacattttag aatataatta accagtcccc tattaatgga tatttcatgc |
| 12301 | tgtttccaat tttatgctat ttcagccatg tgctcatgtg atttcacatg taggataatt |
| 12361 | cacagaagtg gaattgctgg gtctaaatta tatacatttg catttttaaa aggtattgcc |
| 12421 | agattggcct ctacagagtt tggaccaatt tatactgaac tttctccaaa atggacttgt |
| 12481 | tttcccacag ccttgccaat agggtgcatg atcagacttc ggaatctttg taaatctgat |
| 12541 | tggttgaaca atgtatttca aagtacttta attttcattc tcttaaatga gacttttatt |
| 12601 | ctcttaaatt ctcttctatc tttaagggcc ctttatattt cctttttctg tggagaaagt |
| 12661 | ggaaatgcca ataaatacaa cgatgcatac acatgtatag ggttttgtta ttgatgtagc |
| 12721 | ttgtttttgc catcatgctg tacatgatgt tctttaattt gctttgctca tttaaccata |
| 12781 | cctcctggcc atggctctga agagaagttg ctggcagtgc agaagaaggg ccaggactgg |
| 12841 | aatgtctgct tctctcttca tccttttgcc attgactcct gggggaaata tctgtagacc |
| 12901 | gaagcagtga aatctaatca attctctttc tgacactaat taaggcttca aagagacaga |
| 12961 | taaccacttg ggataattta gtcacagtga aacttgggaa atggtcagta atatttcatc |
| 13021 | ctctgaaagt ggaccccaag aaagttctgg ctctttgagt tgttgtcttg gtaattttca |
| 13081 | gggtaacgtg tataggaaaa cccagattat gcagatgaaa agaaaacaaa catgctcttc |
| 13141 | tgcatccttt gcagatttga aactttgggc acaggtttga tttatttcaa tgagatgttg |
| 13201 | ctattagcat gaacataaag tggtgcaaag ttgtgctgga atatggtctc gtcaactttg |
| 13261 | ggctcactgt ctgcatatgg agatgatagt aactgaatcc atagttatca agtggtggca |
| 13321 | ttttagaaca caaagggaca gcagatgcca tctctgtcaa ctccttccct ctacagatga |
| 13381 | ggaaacttgg gctagaggag gttgaatgac ttgtgtaagg cttccccagc taattaatgg |
| 13441 | cagtgccagg actcaagtcc aggtgggttc cctcattact ggtccttgcc cttcctgcaa |
| 13501 | tttataggac ttccctgagg cacatgtgct gaggctttgc tattgccagg gattctgtgc |
| 13561 | tctgaaacag ccctatctca cacacccctt tccacttagg atcccctacc tcacacttcc |
| 13621 | aagacagcta attgaggcta aatgggtctg atgccattct attagtgcaa aataaattgg |
| 13681 | cttatgccaa cttgaactcc taatcttgat tttatcaaca ctttgccctg tttattcaga |
| 13741 | ctgttcatga gtaggaagtt aaggaaaatg ttgcctatga acaaaatgat caaactttta |
| 13801 | tctgaaatac ctttgaaagt tttcccgaag ctttaattat catgttcctt ttgttttgga |
| 13861 | tgtaatagca ggccctccca attttcctaa atgtttgaaa atatttttga tactttctgt |
| 13921 | cttctgttgt ggttaaaaaa aagaaggcac cagtgttggc tatgcctggg gagttagtga |
| 13981 | ggtaatctgg agagatctct ggaccccagt cctttgtcca agaggtatgg tcaaaagaac |
| 14041 | aaagcaaatt tcagaaaaac cggtataata tgatcctatt ttaatggtaa gtctgttcca |
| 14101 | acaactgctt tctttttcga attacaccat gtgcccaggc tacaaaggct ctgcagaaat |
| 14161 | gtgactctgt tggcaaatac gcgtgtgata ccttaaccat gctggaggcc agttagcata |
| 14221 | atgbitattt cagatgcagt ttgtcatcag tgcbgggtgc tatggggctt aaaacaaaaa |
| 14281 | caggatgagc ctagagcaca gaagtggaaa attaggtggg tgggtgagta tggacttgga |
| 14341 | aatggaaaat gtgcttccct gtgggacatg gcttgtgttc attagtgctg acctgcctcc |
| 14401 | tctctagccc tgtaagctga cgctgacacc aaagcttgct gagaaactga atagaccctc |
| 14461 | ccgccccgac caaccaagga caaagatgag accacccaat tcggttacgt tgttgccaga |
| 14521 | acaacatgtt taatctttaa catgggttca aactattctt ggccctagga acatggactt |
| 14581 | cagcaattaa agtcaacatg tgcttccatt aaaccattgt gtccacctcc aaatggttat |
| 14641 | aaatatgtag cataagctat gggagttggg gtggaatgga tgacagcctt tgctaatgac |
| 14701 | gctctagaaa ccaatattct cctctcaaaa taacatggaa aaattctact taatacctcc |
| 14761 | tgggttccat tagtggttct gggtaaataa ttctggggaa agtaatttct gttttcattc |
| 14821 | cagctgtgca gcagatactg tgatgatgga ttgcaagtgc aaagagtaag acaaaactcc |
| 14881 | agcacataaa ggacaatgac aaccagaaag cttcagcccg atcctgccct ttccttgaac |
| 14941 | gggactggat cctaggaggt gaagccattt ccaatttttt gtcctctgcc tccctctgct |
| 15001 | gttcttctag agaagttttt ccttacaaca atgagaaaac atgtactagc tgcatccttt |
| 15061 | tctatgctct ccctgcbggt gataatggga gatacagaca gtaaaacgga cagctcattc |
| 15121 | ataatggact cggaccctcg acgctgcatg aggcaccact atgtggattc tatcagtcac |
| 15181 | ccattgtaca agtgtagctc aaaggtaaga ccaaggtctc tgtgaggaga gcatttccct |
| 15241 | cagaaacagg caagaagcca tatttctttg tcaggggatg gagaactaag atcatagccc |
| 15301 | aaacttaagt gatgtggctg gcccacaggg cttgtgggag aatgaggctt ttagaatttc |
| 15361 | cccccgtgct ttgcactgtt atcagtaaaa gtgcctaatc aatcatgtgc acacccatcc |
| 15421 | agtgggacag gtgtcctttg tccctggctg tgatgtttat gagtggtagt gtgcttttcc |
| 15481 | aaaaaagaaa aatggagttt acaagtcatc ataactctct agctccatca tcaataaaga |
| 15541 | ggaagagaat gcaaagaatg cgattgagca gtggaacata cttcttggag ggctctttaa |
| 15601 | agagattctt ggtgaaataa ctggctttgt ggtctgagcc tttcttcagg tgctacattt |
| 15661 | ctgttcaaat gatttcaaaa gataagatgg caatatgatc atttatcatt tttacattgc |
| 15721 | ttatccaaat cgttctcatt tggaaaagga tgcabitttc ttgcagaggc agtccgtgcc |
| 15781 | tcagtggtgt gcaagggaat atcatgctta aaaggccacc aagagtggcc agctacatgg |
| 15841 | accacccaga agggaggcac attgtagggt ggaacatacg agatctcacg actgtcactg |
| 15901 | cccctaaaca ggcacaatga atgaaatttg tccacacttg gtaaataata atttgtttag |
| 15961 | cccaacctca gagattttta catttagttt tgagatgaaa atcacttaaa cattctcgta |
| 16021 | tggcaagtaa tttttgaaat taccagtata attaagaatt ttttatagta tcaatcacca |
| 16081 | gaattaagac catataagcc aatccctcca ctctccattc aaaaacatta tgacttttgt |
| 16141 | atgccttgaa aatttccatt aatttctctg attatagctc agtgatgatg attcatttta |
| 16201 | gtttaggagg atcagaattc gagttaaatc attttaacca ttatattaat aagatctatg |
| 16261 | actgbjggaa aaaatagaga ttttccactt aataaaaact ttctggctct tatttgtgct |
| 16321 | tgtagaacca aaaaaaaatg gagtaaatag atgaacataa atttttgcag ggccacaatt |
| 16381 | ccttcttagg aaagggaaac taaaacaaat tgagaaaaaa catgagaagt gcttttacaa |
| 16441 | gtgtgattgc tcagaaattg tgggcccatg taaggttgac tgcagcaatt attagtttct |
| 16501 | ccttccctcc cccttcagaa acagacagca tgaatattta gtgattttat tccatggata |
| 16561 | atttctttcc gtattgagtt gtcctccata atcgtgattc ttttttaaaa aaaggaatta |
| 16621 | aaattatttc aaagaaagtg tcactatgat gatagaaagg aacaaagaaa taggagcatc |
| 16681 | tataaaaact agaaaacaat ctggaaagac tggacaaaat gatggaggag tactttggca |
| 16741 | acaatcacat taatctagcg aaggtcaaag aagagacatc atgaactcaa accgaagaaa |
| 16801 | ttcacatgtg aattctgagc atgagtctta gaaacagact ttagtgtact gttattcacc |
| 16861 | tttgtttctt ccagaaagcc atggcaaata acagcgcaaa attgtgatag caggagaaat |
| 16921 | gtttgtaatt tcatgggaac aatctgtttt caaacatccc aaactatccc aaatatagca |
| 16981 | atagttttat gtaaatggtg cttgcaatta taaacctttc ttccctggcc ataaaatatg |
| 17041 | cctggcaaaa tctcaactac ccagaccttt tctaggttag atttttctct atgtatccag |
| 17101 | gagcaaaact gttttcattt ggaaatgttc tataattctt aactcttaca ttctcgggct |
| 17161 | gatcttttct ctaatgggtc tcacttaatg aaattgtttg cctttagaga cttggataaa |
| 17221 | acatttagcc tatgtctaga aaagaggcaa caacaatcta ccctagcttc tttttacaaa |
| 17281 | gaaaagactg ggatagattt ttttgtctct ataaaaatta tcccttgaca tcatgttcaa |
| 17341 | gggtcattat ttattaaaca tgtgcctact gtttgcctgc caattgttaa tgctttctga |
| 17401 | ctcacattta tccattatct ggccttgtaa aggcaagaaa gggagaatgt gacccaggct |
| 17461 | cagggaaggg agtgtacctg cttgaacacc taatatatgt gtcaggcacc tcatattgta |
| 17521 | tattataatc attgccaaga aacctgtgat ggcaggcatt attattccca ttatcctggt |
| 17581 | aaggaaaact gaagcccaaa ataattagat tgcttgatat catatagcca gggagtggca |
| 17641 | atgtctgcct tacagcattc atcttcccac tacttggatc ttcatattgg aggaacacaa |
| 17701 | gtagaatgta ggagccatca catagaagtt caggctctgc ttctgatctg ctggcagtaa |
| 17761 | taatttatac tcagcaatgt ttctagaaaa aataaataat agtgaaagcc tttctgggag |
| 17821 | ctttcaatga gactgttcat cccagccctg aacttgcagc tggccagtcc taggtccctg |
| 17881 | ctgcccatct cctagcaatt ccggaaagga ctgagaggga gtcaggcaga aaagactggc |
| 17941 | cacagtggcc caccaaagag gacagtgtgg ccacagatta ggatgtgcct gatagtttta |
| 18001 | agtggtggca cctcctgggt ttgggtacaa aagatcctgg gagtagcagg ttcatttata |
| 18061 | atcttcatgg aagactaagt ttctctaaaa tttggagtaa aggctgtaga gcaaacaggc |
| 18121 | aaaagaccag ttgatagtgg aaacagactg cctggtggaa tctctatgag aactgaggca |
| 18181 | tgccaggctt tgaagtgaga gagacctggt ttccaattcc agctccatgg cttgccgaat |
| 18241 | gagtgacttt gaggaagttc agtaacttcc ttctttgtgc ctcagtttct tcccatgcaa |
| 18301 | aatagagctg tctacctgag ggtatgggta tgggtgttgg tgatttgtaa agcatccagc |
| 18361 | ggtgtccagc acataatagc catttaatag aagatattat gatcttgatg ataaagttat |
| 18421 | aaactaagca ggtgtttaga ctcaattttc tatttcagtc acaactgaga tctcaataac |
| 18481 | tgctgggatc tcctatagcc ttaaaagatt aggaaaatga accttattgt agttcttgtt |
| 18541 | aagcacaggg tggggcagaa gagcaaagta aatgtaagcc actgtgctgg gtgctaacag |
| 18601 | ggaggataaa agtaaaagag aaacagcccc gatatctgtc taaccttcct tcccagatga |
| 18661 | gtggaggaag gaggggctgg agggggatga gttttggact tgggccaggg aggggatttc |
| 18721 | aggaatggag ggtgggaaag caaactggca gggaagacct ggaaagtctc agttgggtga |
| 18781 | ggagtggggg atgctggccc caggccaggg catggaacca gggcatgact atctgaaccg |
| 18841 | gtaagggcca caggagcagg tggggaactg gaagagcaac aacaaaggat aaggaggaag |
| 18901 | aggtttggga gacaaaacct aggaaaagag gacctggtat gctaagggct gagtcctaac |
| 18961 | agcttcctaa caggaccccc aagccatctt ctactgctac ccaccaagct catggtgtga |
| 19021 | taggagaaat ggagggagtc aggaaaattg tgtttataat acaatagact tcttgagaga |
| 19081 | tataatttga tttttttaaa aggaacaaat ttatactgag tgcctaccat gtccaggtgc |
| 19141 | tgtggaaggt gctggagact ctaaagtgga aagaaagaaa aaagagacaa tttttttgcc |
| 19201 | ttcatgatgc ttacaagaaa atggggagag agggaggagg ggtgttctgt gcacaaagat |
| 19261 | cagtttgtat ctgtttgatt catgaccgga gtgaagggac cagtttctag ttggagtgag |
| 19321 | ctgagttccc atccaccctt tcaaagcccc caccatctct ctgctgcttt gttccctggt |
| 19381 | tgcaattttc ttggtgccct cagcctagca cagatctttt ggaggttgac ctgggtccct |
| 19441 | gaagatgagc ggagttatga ggctgcccgt ggggaaagaa tgggagaaga agcatgggtg |
| 19501 | aatcttgttc ctgaggttat agagggtgtt tcaagaggtg ccatggaaat aagggtgcat |
| 19561 | agtgttcact gctgcgaaaa aggcaaaata cttttccact cbitcggagt aaaatcgcaa |
| 19621 | aaatgctctt ctagggtggg acaggtgggt ctttattctg atgctaatgg tgacatctgg |
| 19681 | tcagtcaagg ctcttggaag attcagctct gcataagctt ggggatggtg aagctaatgt |
| 19741 | cccaagaagc ccacaagaaa aagttagact tgtatgtcta tggatatggt caggggtttc |
| 19801 | tgaggcaaat caatgtagat aaggaagtct gtgagttggc atatgcttga ggaaaacatg |
| 19861 | gtatcaggag gcaggtatta tactggttta ggtcagggct ttggtttcag atagaccttg |
| 19921 | gtttgattcc agctctgcat tttaccacct atgtgagttt gggcaagtta ctggaactct |
| 19981 | ctaaagcttg agtttcctta tctgtcctaa tagtgtagat cataacagta ctttcttgta |
| 20041 | gggttgttgt aaggatgaaa taactcacat tgcaagtgct caataaatgt tcttattagc |
| 20101 | gaaatgatgg ttatctagtg attcatctag agcacagccc tcaaacttga atgggtccag |
| 20161 | agacctgcta ctcaaagtgt gggcaccagc ccagtaggac tgacatcaac tggaatctga |
| 20221 | tgggaaatgc agaatctcag gctctaggcc agaactactc aatcagaact tgccttttaa |
| 20281 | caagatccta gatgattcac acgcacattc cagtctgaga agctctgatc cggaagagat |
| 20341 | caggagatgt tcaagtgctg aaacacaagt aaggcatggc agaagctaaa atgtgaagta |
| 20401 | ttgagagtaa accaggagag cagatggtta ttccttccat cccttaagga tcttatcttt |
| 20461 | caaacttctg ctttaccact tcaacacaca aaacagagat agatttcctt ctaggagtgt |
| 20521 | gtgtgtgtgt gtgtgtgtgt gtgtgtgttg agaacatcaa tggttcaata attgcttcat |
| 20581 | agtcttttct tccaggaaag agcatttgaa tttggctaca gagaatagat aggtgggatt |
| 20641 | ttattaggca gagcaaggtg gaaaggacat atttgggaga cagaagacat aagcaaaggc |
| 20701 | aagaggcagg agaattcagg gcactttctt ggactcctaa gtagttaagt ttgactggag |
| 20761 | tagggagtgg gtagtagagt gatgagaata gttgtaagta agactggaaa tacatgtgaa |
| 20821 | acctgggtca tgaagggcct tgactcctct tcaagatttt ggattttatt ctgaactact |
| 20881 | gaaggcattt attgtacatg tctgtgcatt cttcttgcac aaacagtcca gctcccaagg |
| 20941 | aagaggggcc cagcccattg gaggtggccc cacgtccttc agtgcctgga gttcttgtcc |
| 21001 | ttcagagtgg gcbgggggtg gagctggaca tcctgaaaac ttttagtgag attgcaatca |
| 21061 | gatgagctca tttacaaatg gccctacgct gttgacttgg tcattttatg gacagtgcta |
| 21121 | atggcccagt cagttaggcc tacgtttggt tcacctgtgt atacatcact tggatattat |
| 21181 | gtcccatatc attgttggcc cttctgagtt aagttcgttg gcacagattt actttgtcca |
| 21241 | cccagactga aactgcacct ctgaagactc catcacggaa ggtgactctg tgaataactg |
| 21301 | cttagtcaac ctaatagatg atctagatga gagattagca aatttaacac tactccaagg |
| 21361 | tgaggtatca agcagctctt cccacataca gggagatggg gggagaacag actaaggaag |
| 21421 | atcttggact ctctctctca ttagagaaat gggggtggga attagggact agcctgtgta |
| 21481 | ctactgacct atggcatagt ctctcaaaac ccatttcaga gccaggcaca gtggtacatg |
| 21541 | cctgtagtcc tggctacaca ggaggctgag gcaggaggat cccttgagct caggagttta |
| 21601 | aggctgtagt gtgctatgat catgcctgtg aataaccact gcactgcagc ctggacaaca |
| 21661 | tagcaagact ctgtctctaa aaacaaaaca aaacaaacaa acaatcattt ctgatagttt |
| 21721 | actttgcctg tcaaaatgaa gagcaggtag gatagaatca aaagctttaa aaaaatcaaa |
| 21781 | acagcttaca gctgctattt tctctctgcc tctgcgatca ttcagagaaa ataaattcac |
| 21841 | tggtctagtc caacttattc ttccctaagc cctgctgttt tttttttcta gtatttcata |
| 21901 | ttgccttggt ggttgctaag tgattgttgg atttagcccc agtatattct cagataacta |
| 21961 | tgccaataat ctataattac cagaattcat cttttctccc ttttggaaag atggactggc |
| 22021 | tatttttttc ttgtaaacct tgggtgttta attctgccct acaggatgat gtcagagata |
| 22081 | atagctggtg agtctttaat aataactgcg aattcctaca atattgtaag gtaaacgtca |
| 22141 | aaaggtttca tgcatatata tgtatctttt aatctttcat ttgaacagtt tcacttttta |
| 22201 | tgatcttgct gttggttctg gaattatagg acaaattttt cttttctttt cttttctttt |
| 22261 | tgagacaggg ccttgctctg tcactcatgc tggagtacag tggcttgatc atagcttcct |
| 22321 | gcagcctcta attcctgggt tcaagtgatc ctcctgcctc agctgccaaa gtagctggga |
| 22381 | ctacaggtgc acatcaccac gcctggttaa ctttttattt ttttttttag agacacggtc |
| 22441 | atgctatgtt gcccaggctg gtctcaaact cctggggtca agtgatcctc ctgcctcaga |
| 22501 | ctccaaagtg ttgggattat aggcatgaga caatacacct ggcccagggg atttttttct |
| 22561 | ccatcactta acatgaaatt caccaagcaa aacctcttac ataaccatgg gaccaataat |
| 22621 | ctcagattct ccattcccct ccccaccttg atattaggat tatgcagctt aatgagtcaa |
| 22681 | gctgtcccac cctacccacc tattactccc actcccagga taccaggagt tttgtatggg |
| 22741 | atacataaat gatccttttt tccattccgt taagctgtat gcaaattgtg tgtgtgctta |
| 22801 | tgtacatttt tctggggata actttggtag ttttcatcag attcttaaag gtgtctgttt |
| 22861 | gctaaagcca gattaagagc tactataaag aacacatagc ctccgttatt ccagcccaat |
| 22921 | ctttggaaat agagattatc agaatgggta catcctaata tttgccgcaa atgactctga |
| 22981 | agatgcggat gcaattacat aaatcccagg ctccttcaac atataaaccc agaagtgtga |
| 23041 | tttcagggcc ccagacatgc cctgtctcta cttcattctc ttgtcccaaa ttgcagcacc |
| 23101 | cagaatattt cttcctaagc attactcagg ctatcctatt ttcttattca gaaactatat |
| 23161 | tcctgttctt tagctatttc ctgcacaaat caatttcttt tttttttttt tttttttggt |
| 23221 | agtcatttta atttacttct tggtttcaat ttggattgac tttctgcatt ttgctactgg |
| 23281 | tagaattgca atgcattggg ccagtggtag accactacct gtcaggagaa atttcttttg |
| 23341 | ttctttggtt tttactcgca catcacagtg atgggcgtca ttcagtggtt ctaaaccctc |
| 23401 | agtacactta gaaatcacct aagaagcttt gaaaaccatg aaagcctggt ccctatctcc |
| 23461 | aaggatttta attcaatcga tctgaatgag gcctgggtgt tgacttaaaa aaaatgcaac |
| 23521 | atgcattgag ccactggtct aatctagcag gaattggcaa cgagtgtgag ggtctttcaa |
| 23581 | aagatgctgt tttacctggc taaggttgtg gcatgcccac agagtaacca cctccttttc |
| 23641 | tttccccaga tggtgctcct ggccaggtgc gaggggcact gcagccaggc gtcacgctcc |
| 23701 | gagcctttgg tgtcgttcag cactgtcctc aagcaaccct tccgttcctc ctgtcactgc |
| 23761 | tgccggcccc agacttccaa gctgaaggca ctgcggctgc gatgctcagg gggcatgcga |
| 23821 | ctcactgcca cctaccggta catcctctcc tgtcactgcg aggaatgcaa ttcctgaggc |
| 23881 | ccgctgctgt gtgtggcttc tggatgggac aactgtagag gcagttcgac cagccaggga |
| 23941 | aagactggca agaaaagagt taaggcaaaa aaggatgcaa caattctccc gggactctgc |
| 24001 | atattctagt aataaagact ctacatgctt gttgacagag agagatactc tgggaacttc |
| 24061 | tttgcagttc ccatctcctt tctctggtac aatttctttt ggttcatttt cagattcagg |
| 24121 | cattttcccc cttggctctc aatgctgttt gggtttccaa caattcagca ttagtgggaa |
| 24181 | aaagtgggcc ctcatacaca agcgtgtcag gctgtcagtg tttggtgcac gctggggaag |
| 24241 | aatttacttt ggaaagtaga aaagcccagc ttttcctggg acatcttctg ttattgttga |
| 24301 | tgtttttttt taccttgtca ttttggtcta aggttgccat tgctgctaaa ggttaccgat |
| 24361 | ttcaaagtcc agataccaag catgtggata tgtttagcta cgtttactca cagccagcga |
| 24421 | actgacatta aaataactaa caaacagatt cttttatgtg atgctggaac tcttgacagc |
| 24481 | tataattatt attcagaaat gactttttga aagtaaaagc agcataaaga atttgtcaca |
| 24541 | ggaaggctgt ctcagataaa ttatggtaaa attttgtaag ggagcagact tttaaagact |
| 24601 | tgcacaaata cggatcctgc actgactctg gaaaaggcat atatgtacta gtggcatgga |
| 24661 | gaatgcacca tactcatgca tgcaaattag acaaccaagt atgaatctat ttgtgggtgt |
| 24721 | gctatagctt tagccgtgtc acgggcatca ttctctaata tccacttgtc catgtgaaac |
| 24781 | atgttgccaa aatggtggcc tggcttgtct tctgaacgtt tggttcaaat gtgttttggt |
| 24841 | cctggaggct caaattttga gttattccca cgttttgaaa taaaaagagt atattcaaaa |

Mouse Mature NDP Protein (NCBI Accession No. NP_035013.1)
(SEQ ID NO: 23)
KTDSSFLMDSQRCMRHHYVDSISHPLYKCSSKMVLLARCEGHCSQASRSEPLVSFSTVLKQPERSSCHCCR
PQTSKLKALRLRCSGGMRLTATYRYILSCHCEECSS
Mouse Mature NDP cDNA
(SEQ ID NO: 24)
aaaacagacagttcatttctgatggactctcaacgctgcatgagacaccattatgtcgattctatcagtca
cccactgtacaaatgtagctcaaagatggtgctcctggccagatgtgaggggcactgcagccaggcatcac
gctctgagcccttggtgtccttcagcactgtcctcaagcaacctttccgttcctcctgtcactgctgccga
ccccagacttccaagctgaaggctctgcgtctgcgctgctcagggggcatgcgacttactgccacttaccg
gtacatcctctcctgtcactgtgaggaatgcagctcc
Rhesus Monkey Mature NDP Protein (NCBI Accession No. NP_001253901.1)
(SEQ ID NO: 25)
MRKHVLAASFSMLSLLVIMGDTDSKTDSSFIMDSDPRRCMRHHYVDSISHPLYKCSSKMVLLARCEGHCSQ
ASRSEPLVSFSTVLKQPFRSSCHCCRPQTSKLKALRLRCSGGMRLTATYRYILSCHCEECNS
Rat Mature NDP Protein (NCBI Accession No. NP_001102284.1)
(SEQ ID NO: 26)
KTDSSFLMDSQRCMRHHYVDSISHPLYKCSSKMVLLARCEGHCSQASRSEPLVSFSTVLKQPFRSSCHCCR
PQTSKLKALRLRCSGGMRLTATYRYILSCHCEECSS
Chimpanzee NDP Protein (NCBI Accession No. XP_016799622.1)
(SEQ ID NO: 27)
KTDSSFVMDSDPRRCMRHHYVDSISHPLYKCSSKMVLLARCEGHCSQASRSEPLVSFSTVLKQPFRSSCHC
CRPQTSKLKALRLRCSGGMRLTATYRYILSCHCEECNS

### Trio Rho Guanine Nucleotide Exchange Factor (TRIO) and F-Actin Binding Protein (TRIOBP)

[0139] The TRIOBP gene encodes “trio Rho guanine nucleotide exchange factor (TRIO) and F-actin binding protein” (TRIOBP), a protein that is expressed along the length of the stereocilia actin filaments and in the stereocilia rootlets of the inner hair cell. TRIOBP is important for the stability and rigidity of the stereocilia of specialized hair cells in the inner ear (see, e.g., Kitajiri et al. (2010) Cell 141: 786-798; and Zhao et al. (2015) Curr. Opin. Neurobiol. 34: 172-179).

[0140] Stereocilia, which are about 10-50 μm in length, are important for hearing and balance. Stereocilia play a mechanosensing role in hearing. By bending in response to sound, they form a structure for mechanoreception of sound stimulation.

[0141] The human TRIOBP gene is located on chromosome 22q13.1. It contains 24 exons encompassing ˜80 kilobases (kb) (Hirosawa et al. (2001) DNA Res 8:1-9; NCBI Accession No. NG_012857.1). To date, there are three known families of TRIOBP splice isoforms: TRIOBP-5, TRIOBP-4 and TRIOBP-1 (see, e.g., Kitajiri et al. (2010) Cell 141: 786-798). While TRIOBP-1 is ubiquitously expressed, TRIOBP-5 and TRIOBP-4 are expressed predominantly in the inner ear and in the eye. TRIOBP-5 gene (NCBI Accession No. NM_001039141), the longest isoform, contains 24 exons, and the translation start site for the TRIOBP-5 isoform is found in exon 3. The TRIOBP-5 protein has a molecular mass of ˜218 kDa. The TRIOBP-4 is gene encoded by exons 1-6 and is expressed from the same promoter as TRIOBP-5. The TRIOBP-4 protein has a molecular mass of ˜107 kDa. TRIOBP-1 (NCB1 Accession No. NM-007032) is encoded by exons 11a-24, has a molecular mass of ˜72 kDa, and is translated from a start site in exon 11a (see, e.g., Siepel et al. (2001) J. Cell. Sci. 114: 389-399).

[0142] Various mutations in the TRIOBP genes have been associated with non-syndromic hearing loss (e.g., profound, prelingual deadness DFNB28 (MIM #609761) (see, e.g., Riazuddin et al. (2006) Am J Hum Genet 78: 137-143) and age-related hearing impairment (see, e.g., Hoffmann et al. (2016) PLoS Genet 12(10): e1006371)). DFNB28-causing mutations have been predominantly found in exon 6 of TRIOBP, an exon that is present in both TRIOBP-4 mRNA and TRIOBP-5 mRNA. DFNB28-deafness can be modeled by generating TRIOBP-4/5 deficient mice, in which mouse exon 8, the ortholog of exon 6 of human TRIOBP-4 and TRIOBP-5, is mutated/deleted (see, e.g., Kitajiri et al. (2010) Cell 141: 786-798). Nonsense mutation (c.5014G>T (p.Gly1672*) in exon 9 of TRIOBP-5) and frameshift mutations (c.2653del (p.Arg885Alafs*120), c.3460 3461del (p.Leu1154Alafs*29), and c.3232dup (p.Arg1078Profs*6) in exon 6)) were found in Dutch families with congenital and moderate hearing impairment (see, e.g., Wesdorp et al. (2017) Hearing Research 347: 56-62). The nonsense mutation found in exon 9 was the first disease-associated mutation that was present only in TRIOBP-5.

[0143] Additional exemplary mutations in a TRIOBP gene that have been detected in subjects having hearing loss and methods of sequencing a nucleic acid encoding TRIOBP are described in, e.g., Shahin et al. (2006) Am J Hum Genet 78:144-152; Diaz-Horta et al. (2012) PLoS One 7: e50628; Gu et al. (2005) Clin. Genet. 87: 588-593; and Table 1 in Wesdorp et al. (2017) Hearing Research 347: 56-62. Methods of detecting mutations in a gene are well-known in the art. Non-limiting examples of such techniques include: real-time polymerase chain reaction (RT-PCR), PCR, sequencing, Southern blotting, and Northern blotting.

[0144] An exemplary human wildtype TRIOBP protein is or includes the sequence of SEQ ID NO: 28, SEQ ID NO: 30, or SEQ ID NO: 31, SEQ ID NO: 32. Non-limiting examples of nucleotide sequences encoding a wildtype TRIOBP protein are or include SEQ ID NO: 29, and SEQ ID NO: 33.

[0145] In some embodiments of any of the compositions described herein, the TRIOBP protein comprises a sequence that is at least 75% (e.g., at least 80%, at least 85%, at least 90%, at least 91%, at least 92%, at least 93%, at least 94%, at least 95%, at least 96%, at least 97%, at least 98%, at least 99%) identical to SEQ ID NO: 28.

[0146] In some embodiments of any of the compositions described herein, the TRIOBP protein comprises a sequence that is at least 75% (e.g., at least 80%, at least 85%, at least 90%, at least 91%, at least 92%, at least 93%, at least 94%, at least 95%, at least 96%, at least 97%, at least 98%, at least 99%) identical to SEQ ID NO: 30.

[0147] In some embodiments of any of the compositions described herein, the TRIOBP protein comprises a sequence that is at least 75% (e.g., at least 80%, at least 85%, at least 90%, at least 91%, at least 92%, at least 93%, at least 94%, at least 95%, at least 96%, at least 97%, at least 98%, at least 99%) identical to SEQ ID NO: 31.

[0148] In some embodiments of any of the compositions described herein, the TRIOBP protein comprises a sequence that is at least 75% (e.g., at least 80%, at least 85%, at least 90%, at least 91%, at least 92%, at least 93%, at least 94%, at least 95%, at least 96%, at least 97%, at least 98%, at least 99%) identical to SEQ ID NO: 32.

Human Full-length Wildtype TRIOBP Protein Isoform5
(SEQ ID NO: 28)
MEEVPGDALCEHFEANILTQNRCQNCFHPEEAHGARYQELRSPSGAEVPYCDLPRCPPAPEDPLSASTSGC
QSVVDPGLRPGPKRGPSPSAGLPEEGPTAAPRSRSRELEAVPYLEGLTTSLCGSCNEDPGSDPTSSPDSAT
PDDTSNSSSVDWDTVERQEEEAPSWDELAVMIPRRPREGPRADSSQRAPSLLTRSPVGGDAAGQKKEDTGG
GGRSAGQHWARLRGESGLSLERHRSTLTQASSMTPHSGPRSTTSQASPAQRDTAQAASTREIPRASSPHRI
TQRDTSRASSTQQEISRASSTQQETSRASSTQEDTPRASSTQEDTPRASSTQWNTPRASSPSRSTQLDNPR
TSSTQQDNPQTSFPTCTPQRENPRTPCVQQDDPRASSPNRTTQRENSRTSCAQRDNPKASRTSSPNRATRD
NPRTSCAQRDNPRASSPSRATRDNPTTSCAQRDNPRASRTSSPNRATRDNPRTSCAQRDNPRASSPSRATR
DNPTTSCAQRDNPRASRTSSPNRATRDNPRTSCAQRDNPRASSPNRAARDNPTTSCAQRDNPRASRTSSPN
RATRDNPRTSCAQRDNPRASSPNRATRDNPTTSCAQRDNPRASRTSSPNRATRDNPRTSCAQRDNPRASSP
NRTTQQDSPRTSCARRDDPRASSPNRTIQQENPRTSCALRDNPRASSPSRTIQQENPRTSCAQADDPRASS
PNRTTQQENPRTSCARRDNPRASSRNRTIQRDNPRTSCAQRDNPRASSPNRTIQQENLRTSCTRQDNPRTS
SPNRATRDNPRTSCAQRDNLRASSPIRATQQDNPRTCIQQNIPRSSSTQQDNPKTSCTKRDNLRPTCTQAD
RTQSFSFQRDNPGTSSSQCCTQKENLRPSSPHRSTQWNNPRNSSPHRTNKDIPWASFPLAPTQSDGPRTSS
PSRSKQSEVPWASIALRPTQGDRPQTSSPSRPAQHDPPQSSFGPTQYNLPSRATSSSHNPGHQSTSRTSSP
VYPAAYGAPLTSPEPSQPPCAVCIGHRDAPRASSPPRYLQHDPFPFFPEPRAPESEPPHHEPPYIPPAVCI
GHRDAPRASSPPRHTQFDPFPFLPDTSDAEHQCQSPQHEPLQLPAPVCIGYRDAPRASSPPRQAPEPSLLF
QDLPRASTESLVPSMDSLHECPHIPTPVCIGHRDAPSFSSPPRQAPEPSLFFQDPPGTSMESLAPSTDSLH
GSPVLIPQVCIGHRDAPRASSPPRHPPSDLAFLAPSPSPGSSGGSRGSAPPGETRHNLEREEYTVLADLPP
PRRLAQRQPGPQAQCSSGGRTHSPGRAEVERLFGQERRKSEAAGAFQAQDEGRSQQPSQGQSQLLARQSSP
APSRQVTMLPAKQAELTRRSQAEPPHPWSPEKRPEGDRQLQGSPLPPRTSARTPERELRTQAPLESGQAGP
RQPLGVWQSQEEPPGSQGPHRHLERSWSSQEGGLGPGGWWGCGEPSLGAAKAPEGAWGGTSREYKESWGQP
EAWEEKPTHELPRELGKRSPLTSPPENWGGPAESSQSWHSGTPTAVGWGAEGACPYPRGSERRPELDWRDL
LGLLRAPGEGVWARVPSLDWEGLLELLQARLPRKDPAGHRDDLARALGPELGPPGTNDVPEQESHSQPEGW
AEATPVNGHSPALQSQSPVQLPSPACTSTQWPKIKVTRGPATATLAGLEQTGPLGSRSTAKGPSLPELQFQ
PEEPEESEPSRGQDPLTDQKQADSADKRPAEGKAGSPLKGRLVTSWRMPGDRPTLFNPFLLSLGVLAWARP
DLLNFKKGWMSILDEPGEPPSPSLTTTSTSQWKKHWFVLTDSSLKYYRDSTAEEADELDGEIDLRSCTDVT
EYAVQRNYGFQIHTKDAVYTLSAMTSGIRRNWIEALRKTVRPTSAPDVTKLSDSNKENALHSYSTQKGPLK
AGEQRAGSEVISRGGPRKADGQRQALDYVELSPLTQASPQRARTPARTPDRLAKQEELERDLAQRSEERRK
WFEATDSRTPEVPAGEGPRRGLGAPLTEDQQNRLSEEIEKKWQELEKLPLRENKRVPLTALLNQSRGERRG
PPSDGHEALEKEVQALRAQLEAWRLQGEAPQSALRSQEDGHIPPGYISQEACERSLAEMESSHQQVMEELQ
RHHERELQRLQQEKEWLLAEETAATASAIEAMKKAYQEELSRELSKTRSLQQGPDGLRKQHQSDVEALKRE
LQVLSEQYSQKCLEIGALMRQAEEREHTLRRCQQEGQELLRHNQELHGRLSEEIDQLRGFIASQGMGNGCG
RSNERSSCELEVLLRVKENELQYLKKEVQCLRDELQMMQKDKRFTSGKYQDVYVELSHIKTRSEREIEQLK
EHLRLAMAALQEKESMRNSLAE
Human Wildtype TRIODE Isoform5 cDNA
(SEQ ID NO: 29)
atggaggag gtgcctgggg atgccctgtg tgaacacttt gaggccaaca tacttaccca
gaaccgctgt caaaactgct tccaccctga ggaggcccat ggagcaagat accaggagct
caggagccct tcaggtgctg aggtgcccta ctgcgacctg cctcgatgtc cacctgcccc
tgaggaccca ctcagcgcct caacctccgg ctgccagtct gtggtggacc caggcctcag
gccagggccc aagaggggcc catccccctc agcagggctc ccagaagagg gtcccacagc
tgcccccagg agcaggagcc gggagcttga ggcagtaccc tatctggagg gcctgaccac
ttccttgtgt ggcagctgca acgaggaccc cggctctgac cccacctcca gccctgactc
cgccacccct gatgatacca gcaactcgtc ctctgtggac tgggacactg ttgagaggca
ggaggaggag gcccccagct gggacgagct cgcagtgatg atcccgagga ggcctcggga
ggggccgaga gctgacagct cccaaagggc tccgtctctc ctcaccaggt cccctgtggg
aggagatgct gcaggccaga aaaaggagga caccggcggt gggggccgga gcgcaggaca
gcactgggca aggctccggg gagaaagcgg gttgtccctg gagcggcacc ggtcaacact
gacccaggct tcctccatga caccacacag tggacctcga agcaccacgt ctcaggcttc
tcctgcccaa agggacactg ctcaggctgc ctctacacgt gaaatcccca gagcctcctc
tccccatcga atcacccaaa gggacacctc cagggcctca tccacccaac aggaaatctc
cagggcctca tccacccaac aggaaacctc cagggcctca tccacccaag aggacacccc
tagggcctca tccacccaag aggacacccc cagggcctca tctacacagt ggaacacccc
cagagcttcc tctccctcac gaagcaccca actggataac cccagaacct cttctaccca
gcaggacaac ccccaaactt cttttcctac ttgtactccc cagcgggaaa accccaggac
accctgtgtc cagcaggacg atcccagagc ctcctctccc aacagaacca ctcaacgaga
gaattccaga acatcctgtg cccagcggga caatcccaaa gcctccagaa cctcctctcc
caatagagcc acacgagaca accccagaac atcctgcgcc cagcgggaca atcccagagc
ctcctctccc agtagagcta cacgagacaa ccccacaaca tcctgtgccc agcgggacaa
tcccagagcc tccagaacct cctctcccaa tagagccaca cgagacaacc ccagaacatc
ctgtgcccag cgggacaatc ccagagcctc ctctcccagt agagctacac gagacaaccc
cacaacatcc tgtgcccagc gggacaatcc cagagcctcc agaacctcct ctcccaatag
agccacacga gacaacccca gaacatcctg cgcccagcgg gacaatccca gagcctcctc
tcccaataga gctgcacgag acaaccccac aacatcctgt gcccagcggg acaatcccag
agcctccaga acctcctctc ccaatagagc cacacgagac aaccccagaa catcctgtgc
ccagcgggac aatcccagag cctcctctcc caatagagct acacgagaca accccacaac
atcctgtgcc cagcgggaca atcccagagc ctccagaacc tcctctccca atagagccac
acgagataac cccagaacat cctgtgccca gcgggacaat cccagagcct cctctcccaa
cagaaccacc caacaagaca gccccagaac atcctgtgcc cgacgggacg atcccagagc
ctcctctcct aacagaacca tccaacaaga gaaccccaga acatcctgtg ccctacggga
caatcccaga gcctcctctc ccagcagaac catccaacaa gagaacccca gaacatcctg
tgcccaacgg gacgatccca gagcctcctc tcctaacaga accacccaac aagagaaccc
cagaacatcc tgtgcccgac gggacaatcc cagagcctcc tctcgcaaca gaaccatcca
gcgagacaac cccagaacat cctgtgccca gcgggacaat cccagagcct cctctcctaa
cagaaccatc caacaagaga acctcagaac atcctgtacc cgacaggaca atcccaggac
ctcctctccc aatagagcca cacgagacaa ccccagaaca tcctgtgccc agcgggacaa
tctcagagcc tcctctccca tcagagccac ccaacaggac aaccccagaa cttgtattca
acagaacatc cccagatcat cttctaccca acaagacaac cctaaaacct cttgtaccaa
acgagataac ctcagaccca cttgtacaca gcgggaccgc acacagtcct tttcctttca
acgagacaac cctggaacct cctcatctca atgctgcacc caaaaggaga atctgagacc
atcatctccc caccgctcca ctcaatggaa caatcccagg aattcatctc cccatcgtac
taacaaagac atcccctggg cctcgtttcc cctccggcca actcagagtg atggtccccg
aacctcttcc ccatctcgct ccaagcaaag cgaggttccc tgggcatcca tcgccctccg
gccaacccaa ggtgacaggc ctcagacatc ctctcccagc aggccagccc agcatgaccc
accccagtcc tcctttggcc ccacccagta caacttgcca tcccgggcca cctcttcctc
ccataaccca ggccaccaga gcacctcccg aacttcctca cctgtgtacc ccgctgccta
tggggctccc ctgacctctc ctgagccctc ccagcctcca tgtgctgtgt gcattgggca
ccgggatgcc cctcgagcct cttcgccccc tcgctatttg cagcacgacc ccttcccctt
cttcccagag ccccgcgccc ctgagagtga accgccccac cacgagcctc cctatatacc
acctgctgtg tgcattggac accgagatgc cccccgggcg tcctcgcccc cccgccacac
ccaatttgac cccttcccct tcctcccaga cacatcagat gccgagcatc agtgtcagtc
cccccaacac gagccccttc agctccctgc acctgtgtgt attgggtacc gagatgcacc
ccgggcctcc tccccaccac gccaggcccc agagccttcc ctcttattcc aggacctccc
cagggccagc acagagagcc ttgtcccttc catggactct ctgcacgagt gcccccacat
ccccacccct gtgtgcattg ggcaccggga tgcaccctcc ttctcatccc caccacgcca
ggctcctgag ccatccctct tcttccagga tccccctgga actagtatgg agagcctggc
cccctccact gactctctgc atggctcccc agtgctgatc ccccaagtgt gcatcgggca
ccgggatgca ccccgagcct cctccccacc ccgccaccca cccagtgacc tagcgttcct
ggcaccctca ccttcaccgg gcagctctgg gggctcccgg ggctcagcgc ctcccgggga
gaccaggcac aacttggagc gggaggagta cactgtgctg gccgacctgc ccccacccag
gaggctggcc cagagacagc cagggcccca ggcgcagtgc agcagcgggg gccgcaccca
cagccctggc cgtgcagagg tggagcgcct cttcgggcaa gagcgcagga agtccgaggc
agcgggggcc ttccaggccc aggacgaggg acggtcacag cagcccagcc aaggccagag
ccaacttctc cgaagacagt ccagccctgc ccccagcagg caggtgacca tgctccctgc
caaacaggca gaactgaccc ggcggagcca agcagagccc cctcatcctt ggagtcctga
gaagagacct gagggagatc ggcagctcca ggggtccccg ctgcccccca ggacatcagc
caggacccct gagagggagc tgcggacaca gagacctctg gagagtggcc aagcaggccc
aagacagcct ctgggggtgt ggcagagtca ggaggaaccg ccagggtccc agggccctca
tagacaccta gaaaggagct ggagcagcca ggagggaggc ctgggccctg ggggctggtg
gggatgtgga gagcccagcc tgggggcagc caaagccccg gagggagcat gggggggcac
ttccagggag tacaaggaga gctgggggca gccagaggcc tgggaggaga agcccactca
tgagctcccc agagaactag gaaagagaag cccactcacg agcccccctg agaactgggg
aggccccgca gagtcctcac aatcctggca ctctgggaca cccactgctg tgggctgggg
ggcagaggga gcgtgtccat acccgcgtgg ctctgagagg cgacccgagc ttgactggag
ggatctgctt ggccttctcc gggcaccagg agagggggtc tgggcccgtg tccccagcct
ggactgggag ggcctcttgg agctcctgca ggccaggctg ccccgcaagg acccagctgg
acacagggat gacctggcca gggctttagg gccagagctg ggtcccccag gcacaaacga
tgtccctgag caggagtcac acagccagcc agaaggctgg gccgaggcca ccccagtcaa
tggacacagc cccgcactgc agtcccagag cccggtccag ctgcccagcc ctgcctgcac
ctccacccag tggccaaaga tcaaagtgac aagaggacca gcgaccgcaa ctctggcagg
cctggagcag acgggccccc tggggagcag gagcactgcg aagggcccca gcttgccaga
gctgcagttc caaccagagg agcctgagga gtcagaacca agcagaggcc aagaccccct
gactgaccag aagcaggcag actcggcaga caagaggcca gcagagggca aggctgggag
cccgctcaag ggccgactgg tgacctcatg gcggatgccc ggggaccggc ccacgctgtt
caatccgttc ctgctgtctc tgggggtcct caggtggcga aggcccgatc tgctcaactt
caagaaggga tggatgtcga tcttggacga gcctggagag cctccctccc cctcgctcac
caccacctct acttcgcagt ggaagaaaca ttggtttgtg ctgacagatt caagtctcaa
atattacaga gactccactg ctgaggaggc agatgagctg gatggtgaga tcgacctgcg
ttcctgcacg gatgtcactg agtacgcggt gcagcgcaac tatggcttcc agatccacac
caaggatgct gtctatacct bitcggccat gacctcaggc atccggcgga actggatcga
ggctctgaga aagaccgtac gtccaacttc agccccagat gtcaccaagc tctcggactc
taacaaggag aacgcgctgc acagctacag cacccagaag ggccccctga aggcagggga
gcagcgggcg ggctctgagg tcatcagccg gggtggccct cggaaggcgg acgggcagcg
tcaggccttg gactacgtgg agctctcgcc gctgacccag gcttccccgc agcgggcccg
caccccagcc cgcactcctg accgcctggc caagcaggag gagctggagc gggacctggc
ccagcgctcc gaggagcggc gcaagtggtt tgaggccaca gacagcagga ccccagaggt
gcctgctggt gaggggccgc gccggggcct gggtgccccc ctgactgagg accagcaaaa
ccggcttagt gaggagatcg agaagaagtg gcaggagctg gagaagctgc ccctgcggga
gaataagcgg gtgcccctca ctgccctgct caaccaaagc cgcggagagc gccgagggcc
cccaagtgac ggccacgagg cactggagaa ggaggttcag gctcttcggg cccagctgga
ggcgtggcgt ctccaagggg aggctcctca gagtgcactg agatcccagg aggatggcca
catccccccg ggctacatct cacaggaggc atgtgagcgc agcctggcag agatggagtc
ctcgcaccag caggtgatgg aggagctgca gcggcaccac gagcgggagc tgcagcgcct
gcagcaggag aaggagtggc tcctggctga ggagacggca gccacggcct cagccattga
agccatgaag aaggcctacc aggaagagct gagccgagag ctgagcaaaa cacggagtct
ccagcagggc ccggatggcc tccggaagca gcaccagtca gatgtggagg cactgaagcg
agagctgcag gtgctatcgg agcagtactc gcagaagtgc ctggagattg gggcactcat
gcggcaggct gaggagcgcg agcacacgct gcgccgctgc cagcaggagg gccaggagct
gctgcgccac aaccaggagc tgcatggccg cctgtcagag gagatagacc agctgcgcgg
cttcattgcc tcgcagggca tgggcaatgg ctgcgggcgc agcaacgagc ggagttcctg
cgagctagag gtgctgcttc gcgtaaaaga aaacgaactc cagtacctaa agaaggaggt
gcagtgcctc cgggacgagc tccagatgat gcagaaggac aagcgcttca cctcgggaaa
gtaccaggac gtctatgtgg agctgagcca catcaagaca cggtctgagc gggagatcga
gcagctgaag gagcacctgc gtcttgccat ggccgccctc caggagaagg agtcgatgcg
caacagcctg gctgagtag
Human Full-length Wildtype TRIOBP Protein Isoform1
(SEQ ID NO: 30)
MTPDLLNFKKGWMSILDEPGEPPSPSLTTTSTSQWKKHWFVLTDSSLKYYRDSTAEEADELDGEIDLRSCT
DVTEYAVQRNYGFQIHTKDAVYTLSAMTSGIRRNWIEALRKTVRPTSAPDVTKLSDSNKENALHSYSTQKG
PLKAGEQRAGSEVISRGGPRKADGQRQALDYVELSPLTQASPQRARTPARTPDRLAKQEELERDLAQRSEE
RRKWFEATDSRTPEVPAGEGPRRGLGAPLTEDQQNRLSEEIEKKWQELEKLPLRENKRVPLTALLNQSRGE
RRGPPSDGHEALEKEVQALRAQLEAWRLQGEAPQSALRSQEDGHIPPGYISQEACERSLAEMESSHQQVME
ELQRHHERELQRLQQEKEWLLAEETAATASAIEAMKKAYQEELSRELSKTRSLQQGPDGLRKQHQSDVEAL
KRELQVLSEQYSQKCLEIGALMRQAEEREHTLRRCQQEGQELLRHNQELHGRLSEEIDQLRGFIASQGMGN
GCGRSNERSSCELEVLLRVKENELQYLKKEVQCLRDELQMMQKDKRFTSGKYQDVYVELSHIKTRSEREIE
QLKEHLRLAMAALQEKESMRNSLAE
Human Full-length Wildtype TRIOBP Protein Isoform4
(SEQ ID NO: 31)
MIPRRPREGPRADSSQRAPSLLTRSPVGGDAAGQKKEDTGGGGRSAGQHWARLRGESGLSLERHRSTLTQA
SSMTPHSGPRSTTSQASPAQRDTAQAASTREIPRASSPHRITQRDTSRASSTQQEISRASSTQQETSRASS
TQEDTPRASSTQEDTPRASSTQWNTPRASSPSRSTQLDNPRTSSTQQDNPQTSFPTCTPQRENPRTPCVQQ
DDPRASSPNRTTQRENSRTSCAQRDNPKASRTSSPNRATRDNPRTSCAQRDNPRASSPSRATRDNPTTSCA
QRDNPRASRTSSPNRATRDNPRTSCAQRDNPRASSPSRATRDNPTTSCAQRDNPRASRTSSPNRATRDNPR
TSCAQRDNPRASSPNRAARDNPTTSCAQRDNPRASRTSSPNRATRDNPRTSCAQRDNPRASSPNRATRDNP
TTSCAQRDNPRASRTSSPNRATRDNPRTSCAQRDNPRASSPNRTTQQDSPRTSCARRDDPRASSPNRTIQQ
ENPRTSCALRDNPRASSPSRTIQQENPRTSCAQRDDPRASSPNRTTQQENPRTSCARRDNPRASSRNRTIQ
RDNPRTSCAQRDNPRASSPNRTIQQENLRTSCTRQDNPRTSSPNRATRDNPRTSCAQRDNLRASSPIRATQ
QDNPRTCIQQNIPRSSSTQQDNPKTSCTKRDNLRPTCTQRDRTQSFSFQRDNPGTSSSQCCTQKENLRPSS
PHRSTQWNNPRNSSPHRTNKDIPWASFPLRPTQSDGPRTSSPSRSKQSEVPWASIALRPTQGDRPQTSSPS
RPAQHDPPQSSFGPTQYNLPSRATSSSHNPGHQSTSRTSSPVYPAAYGAPLTSPEPSQPPCAVCIGHRDAP
RASSPPRYLQHDPFPFFPEPRAPESEPPHHEPPYIPPAVCIGHRDAPRASSPPRHTQFDPFPFLPDTSDAE
HQCQSPQHEPLQLPAPVCIGYRDAPRASSPPRQAPEPSLLFQDLPRASTESLVPSMDSLHECPHIPTPVCI
GHRDAPSFSSPPRQAPEPSLFFQDPPGTSMESLAPSTDSLHGSPVLIPQVCIGHRDAPRASSPPRHPPSDL
AFLAPSPSPGSSGGSRGSAPPGETRHNLEREEYTVLADLPPPRRLAQRQPGPQAQCSSGGRTHSPGRAEVE
RLFGQERR
Human Full-length Wildtype TRIOBP Protein Isoform6
(SEQ ID NO: 32)
MEEVPGDALCEHFEANILTQNRCQNCFHPEEAHGARYQELRSPSGAEVPYCDLPRCPPAPEDPLSASTSGC
QSVVDPGLRPGPKRGPSPSAGLPEEGPTAAPRSRSRELEAVPYLEGLTTSLCGSCNEDPGSDPTSSPDSAT
PDDTSNSSSVDWDTVERQEEEAPSWDELAVMIPRRPREGPRADSSQRAPSLLTRSPVGGDAAGQKKEDTGG
GGRSAGQHWARLRGESGLSLERHRSTLTQASSMTPHSGPRSTTSQASPAQRDTAQAASTREIPRASSPHRI
TQRDTSRASSTQQEISRASSTQQETSRASSTQEDTPRASSTQEDTPRASSTQWNTPRASSPSRSTQLDNPR
TSSTQQDNPQTSFPTCTPQRENPRTPCVQQDDPRASSPNRTTQRENSRTSCAQRDNPKASRTSSPNRATRD
NPRTSCAQRDNPRASSPSRATRDNPTTSCAQRDNPRASRTSSPNRATRDNPRTSCAQRDNPRASSPSRATA
DNPTTSCAQRDNPRASRTSSPNRATRDNPRTSCAQRDNPRASSPNRAARDNPTTSCAQRDNPRASRTSSPN
RATRDNPRTSCAQRDNPRASSPNRATRDNPTTSCAQRDNPRASRTSSPNRATRDNPRTSCAQRDNPRASSP
NRTTQQDSPRTSCARRDDPRASSPNRTIQQENPRTSCALRDNPRASSPSRTIQQENPRTSCAQRDDPRASS
PNRTTQQENPRTSCARRDNPRASSRNRTIQRDNPRTSCAQRDNPRASSPNRTIQQENLRTSCTRQDNPRTS
SPNRATRDNPRTSCAQRDNLRASSPIRATQQDNPRTCIQQNIPRSSSTQQDNPKTSCTKRDNLRPTCTQRD
RTQSFSFQRDNPGTSSSQCCTQKENLRPSSPHRSTQWNNPRNSSPHRTNKDIPWASFPLRPTQSDGPRTSS
PSRSKQSEVPWASIALRPTQGDRPQTSSPSRPAQHDPPQSSFGPTQYNLPSRATSSSHNPGHQSTSRTSSP
VYPAAYGAPLTSPEPSQPPCAVCIGHRDAPRASSPPRYLQHDPFPFFPEPRAPESEPPHHEPPYIPPAVCI
GHRDAPRASSPPRHTQFDPFPFLPDTSDAEHQCQSPQHEPLQLPAPVCIGYRDAPRASSPPRQAPEPSLLF
QDLPRASTESLVPSMDSLHECPHIPTPVCIGHRDAPSFSSPPRQAPEPSLFFQDPPGTSMESLAPSTDSLH
GSPVLIPQVCIGHRDAPRASSPPRHPPSDLAFLAPSPSPGSSGGSRGSAPPGETRHNLEREEYTVLADLPP
PRRLAQRQPGPQAQCSSGGRTHSPGRAEVERLFGQERRKSEAAGAFQAQDEGRSQQPSQGQSQLLRRQSSP
APSRQVTMLPAKQAELTRRSQAEPPHPWSPEKRPEGDRQLQGSPLPPRTSARTPERELRTQRPLESGQAGP
RQPLGVWQSQEEPPGSQGPHRHLERSWSSQEGGLGPGGWWGCGEPSLGAAKAPEGAWGGTSREYKESWGQP
EAWEEKPTHELPRELGKRSPLTSPPENWGGPAESSQSWHSGTPTAVGWGAEGACPYPRGSERRPELDWRDL
LGLLRAPGEGVWARVPSLDWEGLLELLQARLPRKDPAGHRDDLARALGPELGPPGTNDVPEQESHSQPEGW
AEATPVNGHSPALQSQSPVQLPSPACTSTQWPKIKVTRGPATATLAGLEQTGPLGSRSTAKGPSLPELQFQ
PEEPEESEPSRGQDPLTDQKQADSADKRPAEGKAGSPLKGRLVTSWRMPGDRPTLFNPFLLSLGVLRWRRP
DLLNFKKGWMSILDEPGEPPSPSLTTTSTSQWKKHWFVLTDSSLKYYRDSTAEEADELDGEIDLRSCTDVT
EYAVQRNYGFQIHTKDAVYTLSAMTSGIRRNWIEALRKTVRPTSAPDVTKLSDSNKENALHSYSTQKGPLK
AGEQRAGSEVISRGGPRKADGQRQALDYVELSPLTQASPQRARTPARTPDRLAKQEELERDLAQRSEERRK
WFEATDSRTPEVPAGEGPRRGLGAPLTEDQQNRLSEEIEKKWQELEKLPLRENKRVPLTALLNQSRGERRG
PPSDGHEALEKEVQALRAQLEAWRLQGEAPQSALRSQEDGHIPPGYISQEACERSLAEMESSHQQVMEELQ
RHHERELQRLQQEKEWLLAEETAATASAIEAMKKAYQEELSRELSKTRSLQQGPDGLRKQHQSDVEALKRE
LQVLSEQYSQKCLEIGALMRQAEEREHTLRRCQQEGQELLRHNQELHGRLSEEIDQLRGFIASQGMGNGCG
RSNERSSCELEVLLRVKENELQYLKKEVQCLRDELQMMQKDKRFTSGKYQDVYVELSHIKTRSEREIEQLK
EHLRLAMAALQEKESMRNSLAE

[0149] A non-limiting example of a human wildtype TRIOBP genomic DNA sequence is SEQ ID NO: 33. The exons in SEQ ID NO: 33 are: nucleotide positions 1-102 (exon 1), nucleotide positions 601-709 (exon 2), nucleotide positions 4319-4492 (exon 3), nucleotide positions 13440-13579 (exon 4), nucleotide positions 16223-16424 (exon 5), nucleotide positions 18776-18947 (exon 6), nucleotide positions 26198-29516 (exon 7), nucleotide positions 36311-36425 (exon 8), nucleotide positions 37412-38455 (exon 9), nucleotide positions 41655-41732 (exon 10), nucleotide positions 43908-44045 (exon 11), nucleotide positions 54785-54841 (exon 12), nucleotide positions 57890-57997 (exon 13), nucleotide positions 58114-58203 (exon 14), nucleotide positions 58563-58672 (exon 15), nucleotide positions 60626-61151 (exon 16), nucleotide positions 62167-62277 (exon 17), nucleotide positions 68683-68830 (exon 18), nucleotide positions 71087-71189 (exon 19), nucleotide positions 72041-72200 (exon 20), nucleotide positions 72275-72388 (exon 21), nucleotide positions 74663-74749 (exon 22), nucleotide positions 75614-75777 (exon 23), and nucleotide positions 76796-79569 (exon 24). The introns are located between each pair of these exons in SEQ ID NO: 33, i.e., at nucleotide positions 103-600 (intron 1), nucleotide positions 710-4318 (intron 2), nucleotide positions 4493-13439 (intron 3), nucleotide positions 13580-16222 (intron 4), nucleotide positions 16425-18775 (intron 5), nucleotide positions 18948-26197 (intron 6), nucleotide positions 29517-36310 (intron 7), nucleotide positions 36426-37411 (intron 8), nucleotide positions 38456-41654 (intron 9), nucleotide positions 41733-43907 (intron 10), nucleotide positions 44046-54784 (intron 11), nucleotide positions 54842-57889 (intron 12), nucleotide positions 57998-58113 (intron 13), nucleotide positions 58204-58562 (intron 14), nucleotide positions 58673-60625 (intron 15), nucleotide positions 61152-62166 (intron 16), nucleotide positions 62278-6862 (intron 17), nucleotide positions 68831-71086 (intron 18), nucleotide positions 71190-72040 (intron 19), nucleotide positions 72201-72274 (intron 20), nucleotide positions 72389-74662 (intron 21), nucleotide positions 74750-75613 (intron 22), and nucleotide positions 75778-76795 (intron 23).

| Human Wildtype TRIOBP Genomic Sequence (NCBI Accession No. NG_012857.1) | |
|---|---|
| (SEQ ID NO: 33) | |
| 1 | cttccacctc ccgagcatcg ctctgattca ttgttaaaat aaagaggcca tgaccctggc |
| 61 | actcccaccc cggcagcccc tgtgcgtgga aacccagcca aggttagcac tgggcctcag |
| 121 | aaaagaggag ctggtagggg gaggcctaca ggaggggtag gggtcgaggg atccggggag |
| 181 | gaactggctg aatgcctgga tggagagggt cccgggtcca ttctctgggt ggggcatgtg |
| 241 | tagctgctta aggttttgat tattatatcc acatctcaag tgcattttag agaaggattc |
| 301 | tgcctattgg ttgtgggtag gggaggaaac gggagcagcg aggggcacgt ggagtagagc |
| 361 | cccctaccca cccccaggaa aatgagcggc gttctcctgc taggcgacgc tcctttatgt |
| 421 | ggccagacca ggagagaaac gcccaggacg ggcggggccg atgcgcccct cttccaccac |
| 481 | caggagtcgg gaggacgacc gcccggggag gatcagagac cctggggcca cggaaggacc |
| 541 | agtgggtagc cctctcccca ccgtgccttg ctgtcgcccc caccgcattc ccttctccag |
| 601 | gtctgatgat ggaggagcct tggccctggc tgtcccaggg gaggaggtga aattcctcag |
| 661 | ctctccacca agattggcca caaaagcctg atcccctgga acacagcagg tgaggatgga |
| 721 | tgtgggcagg tgacctgggg gcaccaaaag ctgcaggtgt tttgggatgt tgggttcctc |
| 781 | ccacccccca ccctccccct ggggctctgt gtgagtgggg aggccatctt taagtgattc |
| 841 | tcctgaccca gctccactcc agggcatgga tgttggtggc cttaggggca cccagaaagg |
| 901 | agaacccttg cacaagtaag ataccagggc ggccgggcgc ggtggctcaa gcctgtaatc |
| 961 | ccagcacttt gggaggtcga ggtgggtgga tcacaaggtc aggagttcga gaccagcctg |
| 1021 | gcccatatgg tgaaacctcg tctctaccaa aaatacaaaa aaattatccg ggcatggtgg |
| 1081 | cacatgcctg taatcccagc tatttgggag gctgcggcag gagaattgct tgaatccggg |
| 1141 | aggcagaggt tgcagtgagc cgagatcgcg ccactgcact ccagcctggg tgatagaccg |
| 1201 | agattctgtc tcaaaaaaaa aaaaaaaaaa agaaagaaag acaccagggt ttcagaaggg |
| 1261 | tatgatgctt cacacctgta atcccagcac tttgagggaa ggaggaggat tacttgaggt |
| 1321 | caggagttca ggagttcaaa accagcctgg gtaacactgc aagagccttt tttttttttt |
| 1381 | tttttttttt tgagacacac tgttgcccag gctggagtgc agcggggcga tcttagctcc |
| 1441 | actgcaacct ccacctcctg ggttcaagca attctcttgc cccagcctct tgagtagctg |
| 1501 | ggattacagg catgcgcacc acgcccagct aatttttata gttttagtag agacagggtt |
| 1561 | tcatcatgtt gggcaggctg gtcttgaatt cctggcctca agtgatctgc ctgcctcagc |
| 1621 | ctcccaaagt gctgggatta taggcgtgag ccaccgcacc tggccaagag cccattttta |
| 1681 | caaaataaaa aagaaaaaaa ttagctgggc gtggtggcgt acacctgtag tcccagttac |
| 1741 | tcagtcccag agactgaggc aggagaatca tttgagcccg ggagtttgag gttgcaagga |
| 1801 | gctatgatcg agccactgca ctccagcctg ggtgacagag caagaccctg cccccacctc |
| 1861 | cccaaaaaag acattagggg ccggatgcag tggctcacac ctgtaatccc agcattttgg |
| 1921 | gaggccgaag ggggcggatc acctgaggtc aggagttcac ctggccaaca tggcgaaacc |
| 1981 | ccgttgctac taaaaataca aaaattagcc aggcatgacg gtgcatgcct gtgatcccag |
| 2041 | atactactgg ggaggctgag gtagaattgc ttgaacccag gaggcggagg ttgcagtgag |
| 2101 | ccgagtgagc caagatcaca tcacggcact ccagcctagg tgacagagag agacttcgtc |
| 2161 | tcaaaaaaac aaaacaaaac aaaacgaaaa cacattagga tttctttttg gctaagttct |
| 2221 | gccacaaact tgctgtgtga ctttaggctg ttcacgtttg tcaaagacgt cgtcctcaac |
| 2281 | tctgaaaata cctggccagc tttttgcctc cctcgctgtg cttcccaagg gacctgtgcg |
| 2341 | agttggcagt atgatccagt gctcctcact tccacctccg agagagcagg gacacacaca |
| 2401 | gccctggatt tgaatcagcc actgcgacct tcagtgaccg aaggaacctc tctgagcctt |
| 2461 | agttgcctga tctaaaattg gcattaattt gatctacaat gcagctataa gacaaggaca |
| 2521 | ctcaaacttt ggggcgcact agaatcacct ggggaatcac tttttttttt taagacagag |
| 2581 | tctcactctt atcacccagg ctggagtaca gtggtgcaat cttggctcac tgcaacctcc |
| 2641 | gcctcctggg ttcaagtgat tctcctgcct cagcctcccg agtaactggg actacaggtg |
| 2701 | cataccacca tgcctggcta attttgtatt tttagtagag acagggtttg gcaatattgg |
| 2761 | ccaggctggt ctcgaactcc tgacctcagg tgatctgccc gcctcggcct cccaaagtgc |
| 2821 | tgggattata ggcgtgagcc actgcgcctg gccaggaatc gcttctttat tttcattttc |
| 2881 | atttatttat ttatttattt atttattttg agatggagtc tcgctctgtt gctcagtctg |
| 2941 | gagtgaagtg gcgtgctctc cgctcactgc tacctctgcc tcccaggttc aagcgattct |
| 3001 | cgtgcctcag cctcccaagt agctgggact acaggtgcgt gctaccacgc ccagctaatt |
| 3061 | tttgtattta gtagaggcgg ggtttcacca tgttggccag gctggtcttg aactcctggc |
| 3121 | ctcaagtgat ctgcctgcct cagcctccca aagtgctggg attacaggcg tgagccaccg |
| 3181 | ccctcggctg gaatcacttc tttaacatgc acagccccag acctcagtct cttggagatt |
| 3241 | ctaactgtgt gaattgggag agagaaaggg gaatctagat tttttttttt tttttttgag |
| 3301 | atgtggtctt gctatgttgc ctaggctgga gtgctgtaac tattcacagg tgcagttata |
| 3361 | gcacactacc acctcaaact cctgggctca agagatcctc ccacctctgc ctcccgagta |
| 3421 | gcttggactg caggtgcaca ccatcttacc cagctgaaat ctgctttttt tttttctcag |
| 3481 | tgcagtggca cagtcatggc tcactgcagc ctcgacctcc cagactcagg tgatcctccc |
| 3541 | aacttcagcc tcctgagtag cagggaccac aggcctgcac caccttgccc agctaatttt |
| 3601 | tgtatttttt gtagagacgg agtttcgcca gttgcccagg atggtcttga actcttgggc |
| 3661 | tcaaatgatc cgccgcccgc aatgggccca gctggaatct gcattttttt gttttttgtt |
| 3721 | ttgagatgaa gtctcactct gtcgcccagg ctggagtgca atggcgcaat cttggctcac |
| 3781 | tgcaacctcc gcctcctggg ttcaagccat tctcctgcct caggctccca agtagctggg |
| 3841 | attacaggca cgtgccatca cacttggctg atttttgtat ttttagtaga gacagggttt |
| 3901 | taccatattg gccaggctgg tctcgaactc ctgacctcaa gtgatcggcc cacctcggcc |
| 3961 | tcccaaagtg ctgggattac aggcatcagc cactgtgcct ggcctggtat ctgcattttt |
| 4021 | atgaacagcc caggagggtg taatgcagag tccttggcgt gcactttcag caacactgca |
| 4081 | gtaaggacta gaaatcgcac atcaaatgct ggcagagtgc ctggtgctta gtaggtgctt |
| 4141 | agtgagtgtt tgttgagtga ataaatgaac aggaatggat ggagaacagg aacccaaagg |
| 4201 | aatggatgag taaccttatt tccttggtcc ttgtctggaa actggggcaa ctggggctgg |
| 4261 | ggttcaggtg agtggccagc cagtcatctg gtctttgcct ccccctcatt tttgccaggc |
| 4321 | ctcacataga cggtcagcca ttggatcata ggaactgccc tggcctgact cacccaatat |
| 4381 | ggaggaggtg cctggggatg ccctgtgtga acactttgag gccaacatac ttacccagaa |
| 4441 | ccgctgtcaa aactgcttcc accctgagga ggcccatgga gcaagatacc aggtgggcca |
| 4501 | gttttccacg tggttggggt ggtttgtgat gggggcatgg gtgaaggact gggcctgtgg |
| 4561 | tgtccgctaa ctcgcagttg aacccagatg ctggacttcc tcctgtcgag agcctcggtt |
| 4621 | ttcccacatt gcagggaagt ggttgaacca tgtgaatgtt tcacaatctt cagtcacttt |
| 4681 | cctcctgctt atatgatacg attgttacca tagccttatc taatctgtta cttactttgt |
| 4741 | tattctttaa atcaacatct ttttcccctt ctattgaaac aaaacttcac atcatcaaca |
| 4801 | caagtagaaa actagaatta cttcctgtta agaagaagag gttaagaaga aaggtagagg |
| 4861 | ctgggcacgg tggctcacgc ctgtaatccc agcactttgg gaggccgagg tgggtggatc |
| 4921 | acccgaggtc gggagtttga aaccagcctg gccaacatgg tgaaaattag ctgggcatgg |
| 4981 | tggtgcatgc ctgtaatccc agctacttgg gaggctgagg caggagaatc acttgaacct |
| 5041 | gggaggcgga gattgtggtg agccgagatc gcgccattgc actccagcct gggcaacaga |
| 5101 | atgaaactgt ctcaaaaaac aaaacaaaac aaaacaaaaa agagaagaaa ggtagaaaaa |
| 5161 | gaaaaaacaa aacagaaatg tcgttacacc ctaacttgag agtgttttct ttttcttttt |
| 5221 | cttttttttg agacagagtc tcactctgtc gcctgggcta gagtgcaatg gcaatggtgt |
| 5281 | gatctcagct cactgcaatc tctgcctcct aggttcaagc gatcctcccg cctcagcctc |
| 5341 | ccaagtattg ggattacagg tgcctgccac catgcccagc taatttttgt atttttagta |
| 5401 | gaaacggggt ttcgccatat tggccaggct ggtcttaaac tcctgacctc aggtgatcca |
| 5461 | cccgcctcag cctcccaaag tgttgggatt acaggcgtga gccaccgcgc ctggcctcga |
| 5521 | gagtgttttc tatggaaggc tctgagcttg catcctgctg tctctttgtc aaaaagggag |
| 5581 | attagcagat gttagagaga tgttaagaat acaccagcat catctagaga ttttctttct |
| 5641 | ctctctcttt tttttttttt tttttttttt tggagatagg gtcttgctct gtagcacagg |
| 5701 | ctggagtgca gtggtccaac ctatagtaca tggctcactg tagcctcgac ctcccaggct |
| 5761 | caaatgatct tcccaccttg gcctcctgag tagcagggac tacaggcaca tgccaccatg |
| 5821 | gccagctaat tttcttgtaa agatgggatc tcactatgtt gccagggctg gtctcaaatt |
| 5881 | cctgggctca ggtgatcctc ccacctcaac ctctgtaact gcagggatta caggtgtgag |
| 5941 | acactgcacc tggtctcaag attttcttct tcaagttatt gaaggagtga agaagaatcc |
| 6001 | ttttttttct ttcttttttt ttcatttgag acggagtctc tctctgtcgc caggctagag |
| 6061 | ttcagtggct caatctcagc tcactgcaac ctccgtctcc tgggttcaag caattctcct |
| 6121 | gcctcagcct cctgagtacc tgggattaca ggtgcccacc accatgccca gctaattttt |
| 6181 | gtatctttag tagagacagg gtttcaccat gttggtcagt ctggtctcga actcctgacc |
| 6241 | ttgtgatctg tctgcctcgg cttcccaaag tgctgggatt acaggtgtga gccaccgcgc |
| 6301 | ctggccgaga ttttcttctt caagttattg aaggagtgaa gaagagtcct tttctgactt |
| 6361 | tgtgattgat gtagtctgct gccaagcccc catgcatgta aacacagagc acctgataca |
| 6421 | cacgcaatga gaaacctggg actcacgaac ctccgagggc ccttccaacc ttgaccacca |
| 6481 | tggcttcgtc attcccattg gggtctgaag gtcctctttt tttttttttt tttttgagac |
| 6541 | agagtctcgt tctgttgccc aggctggagt acagtggtgc gatctgggct cactgcaagc |
| 6601 | tcggcctccc aggtttatgc cattctcctg cctcagcctc atgagtagct gggacaacag |
| 6661 | gcacccggca ccacgcccag ctaatttttt gtctttttag tagagacagg gtttcaccat |
| 6721 | gttagccagg atggcctcga tcttcctgac ctcgttattc gcccacctcg acctcccaaa |
| 6781 | gtgctgggat tacaggcatg agccaccgcg cccagcttct accagtcttg atacctccaa |
| 6841 | taatagctct cttgtgctca cctgcaagtt caggttcagg gaacagatgc ctgggagtcc |
| 6901 | atctttcatg caaatgactt tcttccagtg gttgggaaga tggcaagaat ggaacaggag |
| 6961 | agccgtggat tcaggctcgt ctgagttcta gtctcaatcc caccatttcc cacccgagac |
| 7021 | cgtgggtcag ctcacaaatt catacgtact gaataggtgc ttaaaatgtg ccaggcatta |
| 7081 | tgctagatga tggggaaatc atgataaatc agaaaggcac agccaggcac agtgactcac |
| 7141 | tcctgtaatc ccagcacttt gggaggccaa ggtgggtgga tcacttggag tttgagacca |
| 7201 | tcctggcaac atggcaaaac cccatctcta caaaaaattt aaaaaattag ctgggcgtag |
| 7261 | tgggatgcgg ctatagtctc agttactcag gaggctgagg tgggagaatc acctgagact |
| 7321 | gggaggcggg ggcttcagtg agccgtgatc gcattactgt atttcagcct gggtgacaga |
| 7381 | gttggaccct gactcagaac agaacagaac agaacagaac agaacagaac agaacagaac |
| 7441 | agaacagaac agtacagaaa acagggagaa ggaggggaag ggggagggga agggggaggg |
| 7501 | ggagagagag gaggagagga ggagagaggg acacatccct ggcttgtctt catggggctt |
| 7561 | atattctagc aagagaaatg cacatgatta tttaatcttg gttgtgataa atgtataaag |
| 7621 | gaacagtaag tggcatgaag gtaaaggata gggcattagg gaaagtttct ccaaaaaaaa |
| 7681 | aaaaatgaca tttcagctgc ttagtaaagg ctgtgcaggc attagcatta gtgaaattgc |
| 7741 | aggaagagga gaggaaggaa ggagaatgtg caaaggccag cctggcacgg cagctcacgc |
| 7801 | ctgtaatccc agcactttgg gaggaagtgc ttggattgag gcaccgaagc aggaagatca |
| 7861 | cttgaactca ggagtttgag accagcctgg gcagcacagt gagaccccat ttctaccaaa |
| 7921 | aaaaaaaaaa aaaaaattag ccaggcagga tggtgcacac ctgtagtccc agctagtcag |
| 7981 | aaggctgatg tgggaggatt actggatccc aggagttcaa ggttgcagtg agccatgagc |
| 8041 | atgccaatgc actccagcct gggcaacaga atgagacctt gtctcaaaaa caaaacaaac |
| 8101 | aaacaggtca ggtgcagtgg ttcatgcctg taatctcagc actttacgag gccgagacgg |
| 8161 | gtggatcacc tgaggtcagg agttcaagac caccctggcc aacatggtga aaccccatct |
| 8221 | ctattaaaaa tacacaaatt agctacatgt ggtggtgggt gcctgtaatc ccaggtactt |
| 8281 | aggaggctga ggcaggagaa tctcttgaac ccaggaggca gaggttgcag tgagccaaga |
| 8341 | ttgcaccact gtactccagc ctgggcaaca gagcgagaat cctctcaaaa caaaacaaac |
| 8401 | aaacaaagaa tatgcaaagg ccctgaggca gaaaggaggc tgcacatcgg gctggagagg |
| 8461 | acaggcaaga ggggggcaca gaggagctat aggacaagga tggagaatgg ggggaggcct |
| 8521 | ggtctcactg gccttgtgcg gctttgtgga catgttgagg acttaggatt ctgaggtttt |
| 8581 | tttctgtttt gtttttgttt ttttttgaga tggagtctcg ctctgtcgca caggctggag |
| 8641 | tgcagaggcg tgatctcggc tcactgcaac ctctgcctcc caggttcaag cgattctcct |
| 8701 | gcctcagcct cccaggtagc tgagactaca ggcatgtact accaaaccca gttaattttt |
| 8761 | gtatttttag tagagatggg gtttcaccat gccgctcagg ctggtcttga actcctggcc |
| 8821 | tcaagcaatc tgccctcctt ggcctcccaa agtgctgaga ttacaagtgt gagccacctc |
| 8881 | gcccggccaa gccacggaag atttcaaata agggagtgac gtgctctgat ttgcattttt |
| 8941 | cacagtcact ctgattgctg ggcagagaga atggagggca gggtggtgag agtgaatcag |
| 9001 | gtgacccgcc aggaaaaggt gcacgtactc atcggtgcca gagatgattg gggctttgag |
| 9061 | atggaggcaa atggacacat ttccgaacta attgagcagg cacgtctaca ggatttgggg |
| 9121 | gtgagggagg ggagaaaccc atggctgact cctgtaattt cttcaggcag ggtacttggg |
| 9181 | ttgggaggtc tgtttggagt tgtctggggc atggtgtggg gtgtcggcag gatacagtgg |
| 9241 | agatgagggg gaagttagtg aattggtggg gctggagctc agagccagac catcacagga |
| 9301 | gatggaggcc tgcgagtctt caggatctgt cactgaccaa agtcttgctc acggatgagc |
| 9361 | ctatcatctg tggaagaaag tgtggaatga gatgagaaca ggcctgggtg gaggccaggg |
| 9421 | aatcagcaga gacagccaag aaggccagag gctaggaggc aaaccccaca gtgtgcccct |
| 9481 | cctccccagg agccaagacc agagatggtt tcaagagagg gggccaggca caatggctcc |
| 9541 | cgcctgtgat cacagcactt taggaggctg aggctaaagg atggcttgaa accaggagtt |
| 9601 | taagaccagc ctagttaaca aagtgagatc ccatctctac aaaacaaaaa atgaactggg |
| 9661 | tgtagtggtg catgcctgca gtcccagcta cttgggaggc tgaggcagga ggattgtttg |
| 9721 | agcccaggag attgaggctg cagtgcactg tgatcatgcc actgccacag caagactatc |
| 9781 | ttaaaaaaaa aaaaaaaaga tcagagaggg gcacgacatc aaatcctcca ctttcttgag |
| 9841 | cttccagttg ctctgatgat gatcaaggct gtgaaactct cctttggcaa atgcatgagg |
| 9901 | ggtgactgtt gtgtctccga gccaggccct gggacccaac tctgggcagg tagcagctcc |
| 9961 | ctgtgtatac cagatgtgat agtaaaaaac tgacactggg ccgggcgcgg tggctcacgc |
| 10021 | ctgtaatccc agcactttgg gaggccgagg cgggtggatc acttgaggtc aggagtttga |
| 10081 | gaccagcctg actagcatgg tgaaatcctg actctactaa aaatacaaaa atacaaaaat |
| 10141 | taacagggtg tggtggcgga tgcctgtaat cccagctact cgggaggctg aggcaggaga |
| 10201 | atttcttgaa tccgggaggc ggaggttgca gtgagccgag atctggccac cgcactccag |
| 10261 | cctgggcgac aagagcgaaa aactccatct caaaaaaaac aaaaaaacct cctgggcccc |
| 10321 | agaagatggc aactgcctct tccagcctct tccacctgcc tgcctgtgca ctcctctgcc |
| 10381 | actctggacc tattccatgg tgccacgtgg tcaggcattg aaggaatggg tgggtttttt |
| 10441 | ttccatcacc ctcagatgct gctgctgggg ttggggcggg tcttccctgg ctgactctgt |
| 10501 | ctgcctcacc cactctctcc ccatctctct gtcaccacag gtctccaggg accaaattta |
| 10561 | gcccattttt cctccaagga ttctggaccc ttggccatat ttgcctctag ctttaggtca |
| 10621 | acagatttct aacatggagt caaaaaatct gtatgtttaa aaaaaaaaaa ttggctggga |
| 10681 | gtggtggctc acgtctgtaa tcccagcact ttgggaggcc gaggcaggtg gatcacctga |
| 10741 | ggtcaggagt tcgagaccac cctggccaac atggtgaaac cccgtctcta ctaaaaatac |
| 10801 | aaaaattagc tgggtatggt ggcggacccc tgtagtccca gctactcagg aggctgaggc |
| 10861 | aggacaattg cttgaacccg ggaggcagag gttgcagtga gctgagatcg cgccattgca |
| 10921 | ctccagcctg ggtgacagag tgagactctg tctcaaaaaa aagaaaaaaa aaaaaaaggc |
| 10981 | cgggcgtggt ggctcacggc tgtaatccca gcactttggg aggccgaggc gggcggatca |
| 11041 | cgagatcagg agatcgagac catcctggct aacacggtga aaccctgtct ctactaaaaa |
| 11101 | tacaaaaaat tagctgggca tggtggcggg cgtccatagt cccagctact cgggaggctg |
| 11161 | aggcaggaga atggcatgaa cccgggaggc ggagcttgca gtgagccaag atcacgccac |
| 11221 | tgcactctag cctgagcgac agagtgagac tccgtctcac aaaaaaaaaa aaaaaaaaaa |
| 11281 | attgaggcca ggcacagtgg ctcatgcctg tgatcccagc actttggccg aggcaggcag |
| 11341 | atcacctgcc atcaggagtt cgagaccagt ctcgccaaca tggcaaaccc ctgtctctac |
| 11401 | taaaaataga aaaattagcc gggcatggtg tcgggcacct gtaatcacag ctactggggt |
| 11461 | ggctgaggca gaagaattgc ttgaacccag gaggcgaagg ttgcagtgag ccgagactgc |
| 11521 | accattgcac tctaacctgg gctataagag cgagactctg tctcaaaaaa aaagcccttt |
| 11581 | acaaatatta actcgtttaa ttctcagaac acccctagga ggtgggtcct gctatcctgc |
| 11641 | cggttttgta gatgaggtaa ctgaggcaca gagaggataa gtcacgtggc ccaggtcttg |
| 11701 | gtcgcttctc agcctccatt tccgagagga gaaaacaatg ctccgaaagg ggaagtcatc |
| 11761 | ggcctgaggt caccagccgg gaaccggagg agccaggatg gggcccgagg tccatctgag |
| 11821 | gccagagcca gtgctgaccc gccagacagg aaatcagagc tggggactga ccgtggggcc |
| 11881 | cactcaagtg ggtggtgtgg ggtggtgacg ggggctgggg tgaaagccag gatgaggtgt |
| 11941 | cacattaggc tagggttcct gctgggcctg gcggggcaga gacccctggt tgatgcctgg |
| 12001 | caagtctctc ctcatttctg ctgtgctgtc ccctgggtgg ccaaggcgcc aggcccggct |
| 12061 | gtggatctga cacctcctgc tgccgagctc tgatcagaat ctggctgcag ggcagggggt |
| 12121 | gaaactgaat cccaccaggc ctcccctggc ctggatgtca cggcagacat cccaacccca |
| 12181 | cttcttggca ctgcctgacc ccagcagtgg ccttcttgga acctggagag cctgtgccca |
| 12241 | ccctgtggtg ccgaccaggc tgctgccttg gccctgggct ctgggctcca gggtccccag |
| 12301 | ggatcccagg cccaggctct tgcccctccc ggctctcagg tgagctgctg ggatcgggtt |
| 12361 | cctgcggttt catgtctttc attgttcttg gctggggccc ggcttatgaa actgtaatga |
| 12421 | ggggcccctg ctcccgaagc cggcccctct aaggtttcca ctgcctcggc ggctgctgcc |
| 12481 | accacagccc ggagtcgggg cctgggaggg cagcagtgtg ggggcctgag ccggagcccc |
| 12541 | ccggggacga gggtgctgac agtcgacagc caccaccacc accagagccc gcagcccagg |
| 12601 | taatccgaga ggaggcgggg cgcagggtgc catggccgct gtctcccacc accaggggag |
| 12661 | ggaactgccg ctctccagag gtggggagga attggggggg gccctggagg tgagcagccg |
| 12721 | ttcccccctg gtgagcccag caccagacca gccttcacag gtgtggcctt gccaaaggtg |
| 12781 | gagggagaga ggagtgggca gctggctcta gcccccgccc ttttcctggg gccttgaccc |
| 12841 | tccagccctg gatcccctgc ctctccttta gtggggcaaa tctcttctgt cctccaagac |
| 12901 | cttgctttcc catctcctct accatcaaac tgcctcttcc tccctcagac ctctcccttc |
| 12961 | tctcagccag cctaatcctt cctcctcgcc cttgtctttt ggccgcaaaa gaccctggtg |
| 13021 | gatccttcta tccacctcgt tctggggcgc acgcacatac atgcatgtat acatgaagtt |
| 13081 | gcactcatgc aaacgtacag atcggtgtac ccgcgggacc tgcgtagaca cgcatgcgca |
| 13141 | agagctcgct ccacctatgt gcacacatgt gcccccaata ccaggccttt atccacacac |
| 13201 | atacctgctc caaggcccat atgtgtacac tcacgtgtgc aggcacacac caggtacctc |
| 13261 | agccagccct cggcttgagt cccaaggggt gcttctagcc tgatgggcag ctccttgaga |
| 13321 | agtgcaggat cccccgagga gatgcctgga gactcccacg ccaccgggag gggctgtgca |
| 13381 | gggggagggg agcccccacg tgggcgctga gctgtctcct ctctccaacc ctggcccagg |
| 13441 | agctcaggag cccttcaggt gctgaggtgc cctactgcga cctgcctcga tgtccacctg |
| 13501 | cccctgagga cccactcagc gcctcaacct ccggctgcca gtctgtggtg gacccaggcc |
| 13561 | tcaggccagg gcccaagagg tgggtagagt cccagggccc aggaagggct tcatggggtg |
| 13621 | gaatgccctc acccttccca tttgcactcc ttccccaagg cagcacctgt ctctaatggc |
| 13681 | tgctggcatg ggtcacgtgg tcagtcctct aaacctaggc acaggtgggt ggtgggcatg |
| 13741 | ctccttgggc ccacaggaag aactcagatc acaccaccct gtttgcactt cagtggctga |
| 13801 | gcctcccctc cccagtcctg gctgtctctc ccaggggccc tgcccacccc ataacctccc |
| 13861 | aagaccgagc tcagctttgc cccagggtgt gtggctgctg tacactcacc ttgcagtggg |
| 13921 | catggccaca gcctactcac atttcctggt tccctttgca cagctttaaa agattaaaca |
| 13981 | gtccctgcac ccaggggcac ctgctgtcac ccacctacgt gggtgtgcac tgctccaggc |
| 14041 | tctggggttc cttccaccct caggcctgag tggcagtccc cctttaaggt catggtacct |
| 14101 | tgggaggcca tggtctgaga gtctagaaac ctgggttcca gcttcagatc catccctgat |
| 14161 | gggtcttgag caagttactc tgtctttctg tgtctcagtt tccctctctg taaaataaga |
| 14221 | gggattgaat taaatcagca ttgtgctggg atcattcatg tgctcctcac aggtaggcat |
| 14281 | attaaaacaa acaaacaaac aaaaaaacag cctgggtgca gtggctcatg cctgtaattc |
| 14341 | cagaactttg ggaggccaag gtgggcggat cacttgaggt caggaggtcg agaccagcct |
| 14401 | gaccaacatg gcgaaaccct gtctctacta actatacaaa aattagccag gcatggtggc |
| 14461 | aggtgcctgt aatcccagct gctcgggagg ctgaggcagg agaaccactt gaacccggga |
| 14521 | ggcagaggtt gcagtgagtt gagatcgtgc cattacactc cagcctgggt gacacagcga |
| 14581 | ggctccgtct caaaaaaaaa aaaaacaaca aaaaaaaaaa acaaaaaaaa acccacaaaa |
| 14641 | aaacgaaaaa aaaaacaaag acagctttgt tatcaagtat gtttcagaaa gtctgggata |
| 14701 | aatgaagttg aatagctttc ctgcaggact tgtcagagcc tttagcttgc ctgcgtgcat |
| 14761 | cgtggctttt gggtaacgga agtagagaag tatgtcattt gactacagag ctctttttta |
| 14821 | tggccatcac ttattatcat cgtgtaggcc agtctgtggg tcactctttg gggatactgc |
| 14881 | cagcgctaag ccttcttgag cctgtgactt cttttaaagc agagccttct ctgcagctcc |
| 14941 | ctccctcagc atctgggcta gtgaacccgt caatgcctgt ggagccatgc tgcctctcac |
| 15001 | atcctcgtta gccaagcatg agtctgtctt cttagactta ctgaacttgg ggtcagtaga |
| 15061 | ctaagactaa gacttaaagt tggggctggg gcaatagttt tggttcataa cacagctctg |
| 15121 | ccctttccta tctcggtgac cttggccagt ctcttgacct ctctgagcct cagtgtcttc |
| 15181 | ctctgtgaaa tgggaattat tattattatt attattttga gatggcatct tgctctatca |
| 15241 | cccaagctgg agtgcaatga cacgatgttg gctcactgca acctcagcct cccgagtagc |
| 15301 | tgggattcca ggcatacacc accacacccg actaattttt gtatttttat ttatttattt |
| 15361 | ttgagataga gtctcgtgct gtcacccagg ctggagcgca atggcacgat cttggctcac |
| 15421 | tgcaacctcc acctcctggc ttcaagcgat tatcttgcct cagcctcctg agtagctggg |
| 15481 | attacaggtg tgtgccacca ccatgcccat ctaatttttt tatttttagt agagacgggg |
| 15541 | tttcaccatg ttggacaggc tagtctcgga ctactgacct caggtgatcc acccaccttg |
| 15601 | acctcccaaa gtgctaggat ttcaggtgtg agccactgcg cccggcctaa aatgggaatt |
| 15661 | attatactta ctttaaaggg atgctgttgc tgggcgcagt ggctcacgcc tgtaatccca |
| 15721 | gcactttggg agtccgagac gggcggatca cgaggtcagg agatcgagac catcctggct |
| 15781 | aacacggtga aaccccatct ctactaaaaa atacaaaaaa ttagccaggc gtggtggcgg |
| 15841 | gcgcctgtag tcccagctac tggggaggct gaggcaggag aatggcatga acctgggagg |
| 15901 | cagagattgc agtgagccga gatggtgcca ctgcactcca gcctgggtga cagagcgaga |
| 15961 | ctctgtctca aaataaataa ataaataaat aaataaataa ataaataaat aataaaatta |
| 16021 | caaaaaaaaa agggatgctg ttttagctca atgaggcaat ccatataaaa agtctgacac |
| 16081 | agaggcagct ctcaccattg gctccctttc ccacaccagc gtgtgggccc caggctccct |
| 16141 | gtgtgagtga gtgcatatgc ctgggtgggg tgggggatgc tcctaactcc ccattacttt |
| 16201 | ttgggtctgt ctcctctccc aggggcccat ccccctcagc agggctccca gaagagggtc |
| 16261 | ccacagctgc ccccaggagc aggagccggg agcttgaggc agtaccctat ctggagggcc |
| 16321 | tgaccacttc cttgtgtggc agctgcaacg aggaccccgg ctctgacccc acctccagcc |
| 16381 | ctgactccgc cacccctgat gataccagca actcgtcctc tgtggtgagc caggagtggg |
| 16441 | agtttggggg acaagagtgg ctcacacctc catctgcagc cctgggtccc acctaaacct |
| 16501 | ccaggccagg gctgagcctc acaccaggga atccgacgag gtcctctgga ccattagctg |
| 16561 | gcagctcggg ccaccccggc gaacccctgg agagtgggga tttctgcaca ggctggccca |
| 16621 | gggcagctgg ggtctggctg tgaaaagaca gggaaaggag tttcagccga caggagctct |
| 16681 | gggtgaatca ccagcaggct cgggctgcca catgctctca gatcccagag tgttgggttt |
| 16741 | ggtgtctagc gcaagagtgg cacagggccc cagggccctg ccctcgacac acagtgctga |
| 16801 | gtcccatggc cagccctgga atagatttcc aagagacaga ggaaagggag caggctgcgg |
| 16861 | gggtcattta accacgaaaa gagaagagcc agcagtcttt cctccagcat ttgcattttg |
| 16921 | aggggctgcc gcagagcaga agagacaggc ttgtcccagg agacccccca aaaggaaaat |
| 16981 | gacagggggt ggtgataaga ctcagaataa aacaacccag cctcacacgc ttcatggcca |
| 17041 | gctccatgct aagggcttgg tgggtgtggg ctcaggggag actcaccaca gcctcagaag |
| 17101 | tggagatttc agtcgcccca tatggggctg aggctcagcg gggggagcaa cttagtggag |
| 17161 | gccacacatc tgggaagtag tggggctagg atttgaaccc acttttctct ggcccctggg |
| 17221 | gctacctcac acagtcccac atgcggaact ctgggactct gggcaaagct cttggcttca |
| 17281 | atggatgtac atgcctccta ggtccgttga agatgagcga cttggcactt agcacctgct |
| 17341 | agagcccagc acagtgccag gcaaacagca catgctttta atttaattga ttgattgaag |
| 17401 | actgggtgcg gtggctcacg cctgtaatcc cagcactttg ggaggccaag gtgggcggat |
| 17461 | cacctgaagt caggagatcg agaccagcct ggccaacatg gtgaaactct gtctctacta |
| 17521 | aaaatacaaa aattagcagg gtgtggtggt gggcacctgt aatcccagct acttgggagg |
| 17581 | ctgagacagg agaatcgctt gaacccggga ggttgcagtg agcttagatt gcaccattgc |
| 17641 | actccagcct gggcaacaag agcaaaactc cgtcttaaat agagaaaaaa aaaaaagttg |
| 17701 | attgattgag acagggtctt gctccattgc ccagactgga atgcaatgat gtgaacatgg |
| 17761 | ctcactacag ccttgacttc ctgggctcaa gtgatccccc cacctcagcc tcctcagtag |
| 17821 | ctgggactat aggcatgcac aaccatgcct agttattatt atttttttta attttgtaga |
| 17881 | gacagggtct cactgtgttg cccagcctgg aagtgctttt tactgaggcc atggagcgga |
| 17941 | gtctacacca cagaaggtgt ggcaccactc actgtcacct cttggggaca gaacttgaca |
| 18001 | gtttaggaag tgctttttat tttttattta attttattta tttttgagat ggagtcttgc |
| 18061 | tctgtcacct gggctggagt gcagtgccac aatctcagct cactgcaacc tctgtctccc |
| 18121 | aggttcaagc gattcgcctg cctcagcctc tcgagtatct gggattacag gcgcccacca |
| 18181 | ctatgcctgg ctagtttttg tatttttaat agagacaggg tttcaccatg ttggccaggc |
| 18241 | tggtttcgaa ctcctgccct caggtgatcc acctgcctca gcctcacaaa gtgttgggat |
| 18301 | tacaggcgtg agccactgcg ccctgcaggg aagtgctttg tttttttttg ttttgttttt |
| 18361 | ctttttgttt tttgagacag agtctcactc tgtcacccag gctggagctc agtggcgcga |
| 18421 | tctccactca atgcaagctc cacctcccag gttcacacca ttctcctgcc tcagcttccc |
| 18481 | aagtagctgg gactacaggt gcccgccacc acgcccagct aattttttgt attttttagt |
| 18541 | agagatgggg tttcaccatg tttcccagga tggtctcgat ctcctgacct cgtgatccac |
| 18601 | ccacctcgtc ctcccaaagt gctgggattg caggcgtgag ccacagcgcc tggccaggga |
| 18661 | agtgcttttt aatgccaatt cccttccctt ccttctgccc ctctcatttg gagagtatat |
| 18721 | gtcctgcagc cttttttctc ccgcaaacat actttctcct ccccttctct ggcaggactg |
| 18781 | ggacactgtt gagaggcagg aggaggaggc ccccagctgg gacgagctcg cagtgatgat |
| 18841 | cccgaggagg cctcgggagg ggccgagagc tgacagctcc caaagggctc cgtctctcct |
| 18901 | caccaggtcc cctgtgggag gagatgctgc aggccagaaa aaggagggtg agtccttctg |
| 18961 | ccaggttggt tcccatggtg atggcctggg gccccccaga tagccatctc actggccatt |
| 19021 | tgggactctg ggcacggctt actttggtgg cctgagtgtt aataatagta acagtttgca |
| 19081 | tgtcatgatg gagcagccac aatgagttat gctacccact ttaattatta ttattattat |
| 19141 | ttgggatgga gtcttgctct gttgcccagg ctagagtgca gtggtgtgat ctcggctcac |
| 19201 | tgcaaccttt gcctccccag ttcaagcgat tctcctgccc cagcctccca agtagctaag |
| 19261 | attacaggct cccgccacca tgcccagcta atttttgtct ttttagtaga catggggttt |
| 19321 | caccatgtta gcccagctgg tctcaaactc ccaaccttca gtgatctgcc catcttggcc |
| 19381 | tcctaaattg ccgggattac aggcgtgatt acaggcacgc ctagcctgtt attattatta |
| 19441 | ttattactat tattattttg agataagagt ctcacactgt tgcccagact ggagtgcagt |
| 19501 | ggtgccctct tggctcactg caacctccgc ctcctgggtt caagagattc tcctgcctca |
| 19561 | gcctcctaag tacctgggat tacaggcacc cgccaccaca cgtggctaat ttgtgtattt |
| 19621 | ttagtagaga cagggtttca ccatgttggc cgggcttgtc tcaaattcct ggctggggat |
| 19681 | tacaggagtg agccactatg cctggcctta gccaaggagt ttggacttct ctaaatagta |
| 19741 | gggagccacc gaaggttttt gaggaggaaa gtcatgtaat taaacctgtg cctcaggaag |
| 19801 | ttccctagat caaagatgca aaggatgaat tggagcaggg aggggttgaa ggatgagaaa |
| 19861 | ccagttaaga gactgttgca ggcactgtag caataactgg ttcaggcatg aatcactggc |
| 19921 | ggatgcaaaa tccctagggt gataatttgt cagcaaacag gatagtcatg gtttcaaagt |
| 19981 | attgtgtccg gaattggtgg gttcttggtc tcactgactt caagaatgaa gcggcagacc |
| 20041 | ctcgcgatat tacagttctt aaaggcggcg tgtctggagt ttgttccttc tgatgttcgg |
| 20101 | atgtgtttgg agtttcttcc ttctggtggg ttcgcggtct cgctggctca ggagtgaagc |
| 20161 | tgcagacctt tgtggtgagt gttacggctc ttaaggagac gcgtccgcag ttgttctttc |
| 20221 | ctccctgtgg gttcatggtc tggatggctt caggagtgaa gctgcagacc ttcgtggtga |
| 20281 | gcgttacagc tcataaaggc agtgtggacc caaagagtga gcagcagcaa gatttattgc |
| 20341 | aaagagcgaa agaacaaagc ttccacagca tggaagagga cccgagcggg ttgccagagc |
| 20401 | tggctggggc agcctgcttt tattctcttg tctggcccca cccacatcct gctgattggt |
| 20461 | ccattttaca gagagccgag tggtctgttt tgacagggcg ctgattggtg catttacaat |
| 20521 | ccctgagctt gacacaaagg ttctccacat ccccactaga ttagctagat acagtgtcca |
| 20581 | cacaaaggtt ctccaagtcc ccaacagagt agctagatac agagtgtgga ttggtgcatt |
| 20641 | cacaaaccct gagctagaca cagggtgctg attggtgtgt ttacaaacct tgagctagag |
| 20701 | acagagtgct gattggtgta tttacaatcc cttagctaga cataaaggtt ctccaagttc |
| 20761 | ccactacact caggagccca gctggcttca cccagtggat ctcgttctgg ggctgcaggt |
| 20821 | ggagctgcct gccagtccca tgccatgcgc ccacactcct cagcccttgg gtggttgatg |
| 20881 | ggactgggcg ctgtggagca ggggcggcgc tcatcgggga ggctcgggct gcacaggagc |
| 20941 | ccacggaggc ggggggaagc tcaggcatgg cgggctgcag gtcccgagcc ctgcccggtg |
| 21001 | ggaaggcagc taaggcccgg cgagaaatcc agcgcagcgc tggtgggcgg gcactgctgg |
| 21061 | gggacccagc acaccctccc cagccgctgg cccaggtgct aagcccctca ttgcccgggg |
| 21121 | ccggcagggc cagccggccg ctccgagtgc ggggcccacc aagcccacgc ccacccggaa |
| 21181 | ctccagctgg cccacaagcg ccgcgcgcag cctcggttcc cgctcgcgcc tctccctcca |
| 21241 | cacctccgtg caagctgagg gagccagctc cggcctcggc cagcccagga aggggctccc |
| 21301 | acagtgcagc ggtggcctga agggctcctc aagtgccgcc aaagtgggag cccaggcaga |
| 21361 | ggaggcgccg agagtgagcg agggctgtga gggccgccag catgctgtca cctctcagta |
| 21421 | tcacccctca gattctgcat cgattactga gagaaaggca cccttaggct ggggagagcg |
| 21481 | ggaagatacc actttcacca agaggctgct cagcatcccc agagtggggc aaaccaacat |
| 21541 | aatatgcccc ctgatatgat gcatggggtc aggggagggg atgctggggt gggcacagaa |
| 21601 | tcccttccct tctaaatcgt cctgctgaaa atgcattgcc tacacctaac cccagtgaaa |
| 21661 | catcagacaa acccgaattg aaagacattc tgcaaaatga ctgggctcct cataggacaa |
| 21721 | aaagcggcta ggggactctt cttgattaaa agagactaac aggatgagga cgtggaatgc |
| 21781 | catgtgtgag cccattggga tctgggacag gaggacacag agctgtgaca ggcattactg |
| 21841 | ggacaactgg ggcttgtttt tttttttttt tttttttgag atggagtctt gctctgttcc |
| 21901 | ccaggctgga gtgcagtggc gcgatctcag ctcattgcaa cctccacctc ctgggttcaa |
| 21961 | gcgattctcc tgcctcagtc tcctgagtag ctgggactat aggtgcctgc caccacgccc |
| 22021 | agctgacttt ttgtatttct agtagagaca gggtttcacc atgttgagcc tgatgggatc |
| 22081 | cgggacacgc ctatagtccc agttactcgg gatgctgagg caggaggatc gcttgaactt |
| 22141 | gggaggtgga ggttgccgtg agctgagatc gccccactgc actcccgcct gggcaacaga |
| 22201 | ataagactcc atctcaaata aataaataaa taaataaata aataaataag ggccatggtt |
| 22261 | gtggggtgag gaggggacag agaaggagag aggtttagga ggcagacttg atggtacttt |
| 22321 | ggacaggagg atacacagtc acagctcctg gcctgggtgt ctgggtagat ggtgtgccct |
| 22381 | ttgctgagag caggtggctg gggagcggat gggcccagcg ctggctgtgc tgtgtgggat |
| 22441 | ttgcgagccc tgaggaagag gttttgaggc ttcagatgct cagggaagca ggggatggag |
| 22501 | atgtggcatc ttcaactgag gagcaatgtt cactcaggca ctcagcagac gtttacttac |
| 22561 | tgcccacaag tcaatcatgg ctgaatagat gaggcagcaa tgagaacagc agcagcatta |
| 22621 | cagcagtgac ctgttttttt gatgttccag gccttgtgct aaataaatgt cttgcacaga |
| 22681 | atcactctgg gctccccgat ccctcactcc tggtctgcct ccttcctcac gggccactcc |
| 22741 | acctcgctct cctttgctga ggccgcctcc tctgcttcac ttttaaatat ctgatgcccc |
| 22801 | acatcccagt cctgggcccc ttctgtcttc tccctgcaca cttagctgct tggctttcgg |
| 22861 | tactgtctgg gaaaaaccat gactccggag tccacatctc tggccttgat ttctcccctg |
| 22921 | aacctgccaa tttatacaac ccagccctct actgcgttaa tcacacctca ggccccacac |
| 22981 | tgcactcact gtttcactca tccccccccg cccttttttt tttttttttt tttttttttg |
| 23041 | agacagagtt tcactcttgt tgcccaggct ggagtacaat ggcgcagtct cggctcactg |
| 23101 | caacctccac ctcccaggtt gaagccattc tcctgcctca ggctcccaag tagctgggat |
| 23161 | tacaggcatg caccaccacg cccggctaat tttgtatttt tagtagagac ggggtttctc |
| 23221 | catgttggtc aggctggtct cgaactcccg acctcaggtg atccgctgat ccgcctgcct |
| 23281 | cggcttccca aagtgctggg attacaggcg tgagtgaccg tgcccggccc actgctacaa |
| 23341 | tactattaac taagctacag acgtgatggg attcaccagt ttttctacta atatcctttt |
| 23401 | tctgttccag gatccattcc aggatcccac attgccttta gtccctctcc tcatctcctc |
| 23461 | cgtctcctcc aatctgtgac aggtttccca tctcttccag tttcccctga aggctggggg |
| 23521 | cacagcgatc tgctcacctt tgactttaaa aaaagtctcc ctggatgaac aatgacattg |
| 23581 | gccccagagt gcccaggctt gggggctact gcaaccatcc aggagagaaa tagtggtggc |
| 23641 | ttggagtagg aagtgggtgt agatgagaga aacaggtgaa tatggaatgt atttatttta |
| 23701 | tttttcgtag agatgggggc tcactatgtt gcccaggctg gtctccaact cctgggctca |
| 23761 | agcaatcctc ctgcctcagc ctcccgaaat gttggaatta caggtgtgag ccactaccag |
| 23821 | gcatgaaacg tattttagaa tgccatggga catcagccac cagcaatttt ttttgttttt |
| 23881 | tgttttctga gacagagtct cgctctgtca cccaggctgg agtgcagtgg ccagatctca |
| 23941 | gctcactgca acctccacct cccgggttca agcaattctc cagcctctgc ctcccgagta |
| 24001 | gctgggatta caggcatgca ctactgcatc cggctaattt tttttttttt tttttgtatt |
| 24061 | tttagtagag atggggtttc accgtgttag cagggctggt atcgatctcc tgaccttgtg |
| 24121 | atccgcccgc ctcggcctcc caaagtgctg ggattacagg catcagccac tgctcccggc |
| 24181 | tgcatccagc taatttttgt atttttagta gagactggtt tcaccatgtt ggccaggctg |
| 24241 | gtctcgaact cctgacctca gatgatccac ccgccttggc ctcccaaagt gttagcatta |
| 24301 | caggcgtgag ccaccgtgcc tggcaacctt gcaaattttg aattccctgc taggtgctgg |
| 24361 | gaactcagac tttcaccaac accagcccag agaggctgga cgaggcagtg gctgcaaagg |
| 24421 | gagaggacag gggatcttaa gaaggcgtga agggagggga tctgcatgaa ggcaactgtg |
| 24481 | gctacttttt tgtttcgttt tttgttttaa gacaatgtct tgctctgttg cccatgctgg |
| 24541 | agggcaatgg cacattcttg gctcactgca acctccacct cctgggctca ggcactcctc |
| 24601 | cggcctcagc ctcctaggta gctgggacta caggcacgta ccaccaggcc ctgctaagtt |
| 24661 | ttaaaaaact tgtagtagag acagggtctc gccatgttgc ctaggctggt ctggaactcc |
| 24721 | tgagctcgag tgatcctccc accttggcct ctcaaagtgc tgggattaca ggtgtaagcc |
| 24781 | accacaccca tagttgtggc tcctttaaga tgaggccatg atacccttta ctcttcacct |
| 24841 | aaagcagtag ccaagggaca tgtacatagg ggtgctcaac acctgcttgg tgaccgaggg |
| 24901 | attgagcggg gtggagggtg acacaccaag gtcatggcaa ctctgtcatg aggctaggag |
| 24961 | ttgcaaagag ggtcactact gaggacagtt acattaatcc tttaggccag tgcttctgaa |
| 25021 | actataaggt gtacaaatca ccagacagtt ttgttaaatg cagatccaga agcagtgcat |
| 25081 | ctgggctggg acctgagatt ctgcatttct ggcaaactcc cagctaccag tttataaaag |
| 25141 | gttgtccatc cctgcacctt tcctatcctc atggcagccc taggagaagc ctcagggtag |
| 25201 | gaacatttgg atacaaaaaa acaggggctt tctagagctg tcgcacagga aacaggctca |
| 25261 | ttagaacctg tctctactaa aaacacaaaa atgagctggg catagtggtg catgcctgta |
| 25321 | atcccaacta cttgggaggc tgaggcagga gaatcatttg aacccaggag gcttaggttg |
| 25381 | cggtgagccg agatcgcgtc attgcactct agcctgggtg acagaacgag actctgtctc |
| 25441 | aaaaaaaaaa aaaaaaaggt cgggcatggt ggctcacgcc tgtaatccca gcactttggg |
| 25501 | aggccgaggt gagcggatca cctgaggtca ggagttcgag accagcctgg ccaacatggt |
| 25561 | gaaaccccgt ctctactaaa aatacaaaaa ttagctgggc atggtggcgc atgcctgtaa |
| 25621 | tcccagctac tcgggaggct gaggcaggag aatggcttga acctgggagg cggaggttgc |
| 25681 | catgagccga gatcacgcca ctgcactcca gcctgggcga cagagcgaga ctctgactca |
| 25741 | aaaacaaaac aaaacaagaa atggggggaa ttccttggat tctgattgaa ggaaatagaa |
| 25801 | ctgggaaggg aagactgtca ggtggctgct gttgggccca cctctccctc cctggggtca |
| 25861 | cacaggccat tgtcaacact tctctccaca aatttgcttc ttctctgtct tgtccgtgga |
| 25921 | tccccagacc ctgtggcctt ccagttcttg aacccatctc ttgagtgagt cagggtctca |
| 25981 | atttcaaatt cttgacctca gcttgagaga ggcatccaag cccttgtcta atcagccttg |
| 26041 | gtcagagagg tggagtcact tggtacagac agtgagacct gtaggaggag ggtgtggggt |
| 26101 | ttgccctaat cactggtcct aagggacaaa gaaaggtaga atatgagagc tgcctggacc |
| 26161 | tctcccctta ccttgagccc ctctcttctc tctccagaca ccggcggtgg gggccggagc |
| 26221 | gcaggacagc actgggcaag gctccgggga gaaagcgggt tgtccctgga gcggcaccgg |
| 26281 | tcaacactga cccaggcttc ctccatgaca ccacacagtg gacctcgaag caccacgtct |
| 26341 | caggcttctc ctgcccaaag ggacactgct caggctgcct ctacacgtga aatccccaga |
| 26401 | gcctcctctc cccatcgaat cacccaaagg gacacctcca gggcctcatc cacccaacag |
| 26461 | gaaatctcca gggcctcatc cacccaacag gaaacctcca gggcctcatc cacccaagag |
| 26521 | gacaccccta gggcctcatc cacccaagag gacaccccca gggcctcatc tacacagtgg |
| 26581 | aacaccccca gagcttcctc tccctcacga agcacccaac tggataaccc cagaacctct |
| 26641 | tctacccagc aggacaaccc ccaaacttct tttcctactt gtactcccca gcgggaaaac |
| 26701 | cccaggacac cctgtgtcca gcaggacgat cccagagcct cctctcccaa cagaaccact |
| 26761 | caacgagaga attccagaac atcctgtgcc cagcgggaca atcccaaagc ctccagaacc |
| 26821 | tcctctccca atagagccac acgagacaac cccagaacat cctgcgccca gcgggacaat |
| 26881 | cccagagcct cctctcccag tagagctaca cgagacaacc ccacaacatc ctgtgcccag |
| 26941 | cgggacaatc ccagagcctc cagaacctcc tctcccaata gagccacacg agacaacccc |
| 27001 | agaacatcct gtgcccagcg ggacaatccc agagcctcct ctcccagtag agctacacga |
| 27061 | gacaacccca caacatcctg tgcccagcgg gacaatccca gagcctccag aacctcctct |
| 27121 | cccaatagag ccacacgaga caaccccaga acatcctgcg cccagcggga caatcccaga |
| 27181 | gcctcctctc ccaatagagc tgcacgagac aaccccacaa catcctgtgc ccagcgggac |
| 27241 | aatcccagag cctccagaac ctcctctccc aatagagcca cacgagacaa ccccagaaca |
| 27301 | tcctgtgccc agcgggacaa tcccagagcc tcctctccca atagagctac acgagacaac |
| 27361 | cccacaacat cctgtgccca gcgggacaat cccagagcct ccagaacctc ctctcccaat |
| 27421 | agagccacac gagataaccc cagaacatcc tgtgcccagc gggacaatcc cagagcctcc |
| 27481 | tctcccaaca gaaccaccca acaagacagc cccagaacat cctgtgcccg acgggacgat |
| 27541 | cccagagcct cctctcctaa cagaaccatc caacaagaga accccagaac atcctgtgcc |
| 27601 | ctacgggaca atcccagagc ctcctctccc agcagaacca tccaacaaga gaaccccaga |
| 27661 | acatcctgtg cccaacggga cgatcccaga gcctcctctc ctaacagaac cacccaacaa |
| 27721 | gagaacccca gaacatcctg tgcccgacgg gacaatccca gagcctcctc tcgcaacaga |
| 27781 | accatccagc gagacaaccc cagaacatcc tgtgcccagc gggacaatcc cagagcctcc |
| 27841 | tctcctaaca gaaccatcca acaagagaac ctcagaacat cctgtacccg acaggacaat |
| 27901 | cccaggacct cctctcccaa tagagccaca cgagacaacc ccagaacatc ctgtgcccag |
| 27961 | cgggacaatc tcagagcctc ctctcccatc agagccaccc aacaggacaa ccccagaact |
| 28021 | tgtattcaac agaacatccc cagatcatct tctacccaac aagacaaccc taaaacctct |
| 28081 | tgtaccaaac gagataacct cagacccact tgtacacagc gggaccgcac acagtccttt |
| 28141 | tcctttcaac gagacaaccc tggaacctcc tcatctcaat gctgcaccca aaaggagaat |
| 28201 | ctgagaccat catctcccca ccgctccact caatggaaca atcccaggaa ttcatctccc |
| 28261 | catcgtacta acaaagacat cccctgggcc tcgtttcccc tccggccaac tcagagtgat |
| 28321 | ggtccccgaa cctcttcccc atctcgctcc aagcaaagcg aggttccctg ggcatccatc |
| 28381 | gccctccggc caacccaagg tgacaggcct cagacatcct ctcccagcag gccagcccag |
| 28441 | catgacccac cccagtcctc ctttggcccc acccagtaca acttgccatc ccgggccacc |
| 28501 | tcttcctccc ataacccagg ccaccagagc acctcccgaa cttcctcacc tgtgtacccc |
| 28561 | gctgcctatg gggctcccct gacctctcct gagccctccc agcctccatg tgctgtgtgc |
| 28621 | attgggcacc gggatgcccc tcgagcctct tcgccccctc gctatttgca gcacgacccc |
| 28681 | ttccccttct tcccagagcc ccgcgcccct gagagtgaac cgccccacca cgagcctccc |
| 28741 | tatataccac ctgctgtgtg cattggacac cgagatgccc cccgggcgtc ctcgcccccc |
| 28801 | cgccacaccc aatttgaccc cttccccttc ctcccagaca catcagatgc cgagcatcag |
| 28861 | tgtcagtccc cccaacacga gccccttcag ctccctgcac ctgtgtgtat tgggtaccga |
| 28921 | gatgcacccc gggcctcctc cccaccacgc caggccccag agccttccct cttattccag |
| 28981 | gacctcccca gggccagcac agagagcctt gtcccttcca tggactctct gcacgagtgc |
| 29041 | ccccacatcc ccacccctgt gtgcattggg caccgggatg caccctcctt ctcatcccca |
| 29101 | ccacgccagg ctcctgagcc atccctcttc ttccaggatc cccctggaac tagtatggag |
| 29161 | agcctggccc cctccactga ctctctgcat ggctccccag tgctgatccc ccaagtgtgc |
| 29221 | atcgggcacc gggatgcacc ccgagcctcc tccccacccc gccacccacc cagtgaccta |
| 29281 | gcgttcctgg caccctcacc ttcaccgggc agctctgggg gctcccgggg ctcagcgcct |
| 29341 | cccggggaga ccaggcacaa cttggagcgg gaggagtaca ctgtgctggc cgacctgccc |
| 29401 | ccacccagga ggctggccca gagacagcca gggccccagg cgcagtgcag cagcgggggc |
| 29461 | cgcacccaca gccctggccg tgcagaggtg gagcgcctct tcgggcaaga gcgcaggtga |
| 29521 | gcccgggggt ggggtcagcc aggtgggctg gggaggaggc tcggcagcag gacaggtgaa |
| 29581 | gggttagggt gccaaaagaa agtgttcaaa tccccctggc ttgccattta ccggctgtgt |
| 29641 | gaccttgggc aaatcgctcc atttctctgt ttctgcatat tgggagtttt ctgttttgtg |
| 29701 | tgtgtgtgtg gttaagtgat gtcatgcaca gcccagtggt taacagcaaa gactgcagtc |
| 29761 | aggagggctg agtccaaatc ctgggtcaaa gccacatgtc aactcgtatg acctgatata |
| 29821 | gtgagttaac ctacctgagc ctcagtttcc tcatctgtaa gggaggggaa catgagcaca |
| 29881 | ttcattcaaa taagggtgaa ctgtcttttt attttttatt ttttgttttt ttttttgagg |
| 29941 | tggagttttg ctcttgttgc ccaggccgga gcgcaatggt gcaatctcgg ctcactgcaa |
| 30001 | cctccacctc ctgggttcaa gcgattctcc tgcctcagcc tcccgagtag ctgggattac |
| 30061 | aggcacgtgc caccacaccc ggctaatttt tttgtatttt tactagagac ggggtttcgc |
| 30121 | catattggcc aggctggtct cgaactcctg acctcaagtg atccacccgc ctcggcctcg |
| 30181 | caaagtgcta ggattacagg agtgagccac cgtgcccggc caaaatgaga gtgaactctc |
| 30241 | aaaccctttg atccagactc atgggttttt tttttttttc ttccgtgcat gagggagaag |
| 30301 | aagaaagtac ccatgatttt ttcctgcctt ggcaaagaaa actcatgggt ccctatgcat |
| 30361 | ttcagaaaac agttatgtca atttaaaatg tatggccagg gccgggcacg gtggctcatg |
| 30421 | cctgtaatcc cagcacttgg ggaggccgag gcgggcggat cacaaggtca ggagatcgac |
| 30481 | agcagcctgg ctaacacggt gaaaccccat ctctactaaa aatacaaaaa attagctggg |
| 30541 | catggtggcg ggcgcctgta gtcccagcaa ctcgggaggc tgaggcagga gaattgcttg |
| 30601 | aacctgggag gcggagcttg cagtgagccg agatcgtacc actgcactcc aacctgggtg |
| 30661 | acagagtgag actccatcta aaaataaaaa taaaataaaa atgtatggcc agagctacct |
| 30721 | attttaagaa agaaagctca cagaattatg gatttttagc agtcaaacat cctgggacac |
| 30781 | ctgaagtcca ggtgtctttt gagtctcctt ggtcagcagc actggccccc tggaagggga |
| 30841 | gcatttcctc ctgatcaggc tgaggtttct ctccccagaa gttccagccc tcgagttttc |
| 30901 | aagaatcaga gctagaattc cattagttag ggtcaagaga acaacagcaa caaaaagcag |
| 30961 | tctggaagtc tcaaaacttt ccatgtatat aattcaacga atttttagtt tatttaccaa |
| 31021 | gttgtccaac cattgccaca atctaacttt agaacatttt catcacccta aagggtatgg |
| 31081 | aatattttgt atctaaaatt cctctttgct gctccttggg aaagttttct cctggatttg |
| 31141 | aatctgcatg agaaacctta tcagtcttgg ctgggtgcag tggctccctc ctgtaatccc |
| 31201 | agcactggag cttgcagtga gccaagatca tgccactaca ctccagcctg ggtgacagag |
| 31261 | tgagactccg tctcaaaaaa aaaaaaaaaa aaaaaaatta gccgggcata gtggcacacg |
| 31321 | cctgtagtcc cagctactca ggaggctgag gcagcagtat tgcctgaatt tgggaggtgg |
| 31381 | agtttgcagt gagctgagat tgcgtcattg cactccagcc tgggcaacaa gagtgaaact |
| 31441 | ccatctcaaa aaaagaaaaa aaagaaactt tatctcttgt tcttcaaatt tccttttcca |
| 31501 | gtaagcttga tcatttaata tccagatgac aaccgtgtgg tctccagcat tagtataatt |
| 31561 | ctttctttgg ccttaaaaac aaaaacccag agcagtttta ggtttacagc aaaattgagc |
| 31621 | agaaagtgca gtgttccatg cacagcctct cccactacca atatcctgta ctagataggt |
| 31681 | atgcttgttt ccagctcctg gcctcaaggg atcctccttt cttggcctct caaagtgctg |
| 31741 | gtgagccact gtactgggca gtagggtgat acatttgtta caatccatga acctacacta |
| 31801 | tgaaatcacc caaagtttag ggttcactct tggtgatgta cagcctatag gcttgaatga |
| 31861 | atgtatgaca agtatccacc attgtaacat catggagtag tttcaccctg aaagtcttca |
| 31921 | gtgtctttaa cttttttttt tgtttggaga tggagtctcg ctctgtcacc caggctggag |
| 31981 | tgcagtagtg caatcttggc tcactgcaac ctctgccttc tgggttcaag cagttctcct |
| 32041 | gcctcagcct cccgaggagc tgggactaca ggagcatgcc gccacatccg gctaattttt |
| 32101 | ttgtattttt agtagcgaca gggtttcacc ctgttgccca ggctagtctt gaactcctga |
| 32161 | gctcaggcaa tctacccacc tcggcctccc aaagtgctgg gattataggc gtgagccacc |
| 32221 | gtgcctggtc tgaccttttt tttttttgaa acagggtctt gctttgtcac ccagcagtag |
| 32281 | tgcagtggcg tgatcatggc tcactgcggc ctcaaactgc caggctcaag cgattctctc |
| 32341 | acctcagcct cctcagtagc tgggactaca ggcgtgtacc actataccca gctaattttt |
| 32401 | ctactttttg tagagatgga gtctcacttt gttgcccagg ttggtctcaa actcctggcc |
| 32461 | tcaagcaatg ctcccacctt ggcctcccaa agtgtctttg acctttttat gattactatt |
| 32521 | tcttgtctaa tgtcaatttt cctaactttg tcttaactaa taactcagca gggacattaa |
| 32581 | ggtctttaag ccaaagttaa ttaattttct ttcctttttt ccaggataat ttcagagaga |
| 32641 | taaggtgttt atattaataa tagaaatgag aaatatgttt acacttttat taaccatttg |
| 32701 | tttttacacg atcactccta tacatttaat tctactctct ttgaaatagc ttatttacct |
| 32761 | tttagggaag ttttcataat tttactgaat aattaaaatt tttcctctta tctggcacct |
| 32821 | tttccaagta gaaaaccatt catcctctga atatggaaaa ttttaaaact gtgcagtgtg |
| 32881 | tgtgtaaggg acagactgga gcttatgagc gggtggctgt aggagtgtgc ttttattttc |
| 32941 | tcctatttcc tcatcgatat gtatttattg agcatctact ctgtccaagc attgtcccga |
| 33001 | gtctggaaaa tttttcttaa agggttgtca catcaaagca ttgggagttt tggcttgatc |
| 33061 | ttaatttttt tttccttaga tgcctttggc atctcttaga gtcacgtagc atcctgtggt |
| 33121 | catttgaatt caaaacctag ccttcactgg atttgctaga cttgatggct ttgctccttt |
| 33181 | aattctctct ggaggtcgaa gaacccatct aagcttccga aggaaacgtt tcctttgtca |
| 33241 | tgcttggtgc ggccacatca accctcggga acaggtggcc ccgaggagac gctgttgctt |
| 33301 | cagcatcgga caagccaggt ctctgttggg gtttcagaat cttcttgagt ccctcactct |
| 33361 | tttctctcag ttctacatgg gggaaaaaag gaaggcgagt tctcaggagg aatgctcatc |
| 33421 | aagcaagctg gagttcgtat ggaaaatgca tccatccgga agagaacaca caagtgcctt |
| 33481 | gcttccctgc accgggtgtt tccactattg tcctcctggt cctccccatt agggaggaac |
| 33541 | agcccactgg gtcacgtctg ggctcttgct tcatcgaagc tcctataccc cagttcgggg |
| 33601 | gaaaattcac tctaaggcct tcagctctca cagagtaagg aaacgcactc acctccaatt |
| 33661 | agattacaaa ttggctgggt gcagtggctc atgcttgtaa tgccaagact ttgggaggtc |
| 33721 | aaggcaggtg gattacctga ggtcaggagt tcaaaatgag accagcctgg ccaacatggt |
| 33781 | gaaaccccgt ctctactaaa aatataaaaa ttagctgggc atggtggtgg acacctgtaa |
| 33841 | tcccagctgc tcagcaggct gaggcaggaa aatcacttaa aaccagaagg cggaggttgc |
| 33901 | agtgagctga gattgcacca ctgcactcca gcctgggtga cagagcgaga ctccatctca |
| 33961 | aaaaaaaaaa aaaaaaaaaa gttacaaaca gcctgcccag ggagccctca agctcagaaa |
| 34021 | cacttcctcc agggaacttt ggttcctctc cgaaccagct gccaataact gctaacaact |
| 34081 | aacattattg tgctttatgg ctctgattct aatgacattg gcaaaagaca tgaaacaaca |
| 34141 | aaaaactcca accccatact ttttttttga gacaggatct tgctctttca cccaggctgg |
| 34201 | aatgcagtgg catgatcatg gctcactgca gcctcaacct cccaggctga agcgatcctc |
| 34261 | ccacctcagc ttcccaagta gctgggacta cagccacgta ccaccatgct cggctcatta |
| 34321 | aaaaaatttt tttttcctag aacaaggtct cattctgttg ccagggctgt ctcaaactcc |
| 34381 | tcgactcaag tgatcctctg acctcagcct ccccaagtgc tggaattaca ggtgtaaaga |
| 34441 | cactgtacct ggcctcccaa ccccatatat atatatatat attttttgag acagggtctc |
| 34501 | actatgtcac ccaggctgga gtgcagtggc gcgatctcag ctcactgcaa cctccacctc |
| 34561 | ctggggtcaa gcgatcctcc tgcctcagcc tcctgagtag ctgggattac aggcacgtgc |
| 34621 | caccacgcct ggctaagttt tgtattttta gtagagattg ggtttcacta tgttgaccag |
| 34681 | gctggtctcg aactcctgac ctcaagtgat ccacccacct cagcctccca aagtgctgtg |
| 34741 | attagaggca tgagccacca cacctgggct aatttttgta tttttagaga ctaggtttca |
| 34801 | ctatgttgtc taggctggtc ttgaactcct gagctcaagc catccgcctg cctcagcctc |
| 34861 | ccaaagttct gggattacag gcgtgaccca ttgcgccctg cccaatccca tacttttgaa |
| 34921 | ggtgtcgttc cagcatggct cctcaggcac aggcccacca cagacagcag ggcctatgga |
| 34981 | ggcctgagca gagtttcctc atacttccct ttttgctgcc tcactctggg tccaccacag |
| 35041 | ggtggccttt ttcaggcttc tcttcctggt tcagttcatc gaccaaagac atggctccat |
| 35101 | ttgctaactg agacccaacc aaaataaaca ttcatggagt ggttgggcct tttgttgtga |
| 35161 | ccccttaggt agaggaaggg agagatatgc ccaggttctg tttggtgttt ctacctgtca |
| 35221 | atagagatac cacgttaatc attaacagcc atgcctccca gttagtaagc aagacaacta |
| 35281 | actggaacta gactttttac acaagttaga gatgatcttc atcggatgcg tcaacaatgc |
| 35341 | ctgaagccca gtgtcttaga aacaacactt gcccagggtc aggcgtggtg gctcatgcct |
| 35401 | gtaatcccag ctacttggga gattaaggca gagaatcact tgaacccggg agatggaagt |
| 35461 | tgcagtgagc cgagatcgcg ccactgcact ccagcctggg tgacagagcg agactccatc |
| 35521 | tcaaaaaaaa aaaaaaaaaa aagacacttg cttggacagt ttatgttggc ctctctgaag |
| 35581 | ttgtcaggga gaatgtttct ttcttctgat cttgctcaga gctcttttgc caacagctag |
| 35641 | gatggcctgg agttttcaag gctaagcgct gggattctgt tggttaacag tgatgggagg |
| 35701 | gaaaaaggaa aagaaatcca aaatttacaa tatggacagg aaaaggcaga aagaatggaa |
| 35761 | cacgggggca cacagcagtc tggctctgtc gtcccacctc gtgggctgcg atcatgatac |
| 35821 | aagtgcttgg cccctggaac ataagaagca ctcaataaat gctttgtcat aatgattatg |
| 35881 | tgtgcccagt gcctggtaca cagtaggtgc tcaataaatc ttaattcccg caaagaccag |
| 35941 | tctaaccttt gtctgggggt ggctcttggg ctgctggtgg ggtggtggtt agtcatagga |
| 36001 | agtactggat gagacaggag agggccatgg ccagggccag atccccctcc ccacccaacc |
| 36061 | gcctctactc cccacttttc tcgtcatgtt cgcaagagcc tcatgaggca gaatagagca |
| 36121 | gtgttaacca tccccatttt tcagaagggg aaactaaggc cctgagagtc atcctcactt |
| 36181 | agggcccttc aacgagcttg cagtgggtcc ctggctgtcc cacatctcct cctgttggag |
| 36241 | gtgggagcag aggggctggg gtgctgggag tgggacagtc cctcagagga gtggctgcat |
| 36301 | ttgctcatag gaagtccgag gcagcggggg ccttccaggc ccaggacgag ggacggtcac |
| 36361 | agcagcccag ccaaggccag agccaacttc tccgaagaca gtccagccct gcccccagca |
| 36421 | ggcaggtgag cactgccagc tgtctggggc cccgcacccc aaggggcggc cactgcctct |
| 36481 | tccctcccgc tagaagccag gcagggggct tggacaggaa ggtcctctat gaaagggtcg |
| 36541 | gagtccaatc atggggatcc agctctcccc tctccccaac ggccagcagc tcttggcaaa |
| 36601 | atgcacaaga ccccacatta atcctttgaa gatagcccct ctcccacgct atccccttcc |
| 36661 | tttactaagc actgctgtct tttttttttt tttttttttt tgagatggag tcttgcactg |
| 36721 | tctcccaggc tggagtgcag tgggacaata ttggctcact gcaacctctg cctcccaggt |
| 36781 | tcaagtgatt cttctacctc agcctcccaa atagctggga ttacaggcgt gtgccaccac |
| 36841 | acccaactaa ttttcgtact tttagtagag acagggtttc accatgttgg ccaggctggt |
| 36901 | cactcctgac gtcaagtgat ccgcccacct tggcctccca aggtgctggg attacaggcg |
| 36961 | tgaaccacgg cacctggcca atactgctgt cttgagcaga tttcagggaa agccttgaag |
| 37021 | caagaatctg gctctaaggg ccctctcttt cagggtaatt tgtatcttta accaaaccca |
| 37081 | gagggctagg cccgcctcag tggaatgggg tattggtggt ggaggttctg gcacctgata |
| 37141 | gcccaagttg gaatcagtat ctttgagagg ggtgagaagc caagaacggg ggcaggtctt |
| 37201 | tgcagatctt tttctggaac tgaggaaagc gggtgaaagg gaggagctga ccccggaggg |
| 37261 | gtggggcaga gaccctgtgt actttttggc ctgctttgat tcaggctgct gtgtggacac |
| 37321 | agccttgact ctctgggggc ctaagaaagg cagagctggc agccaggtcc ccagagagag |
| 37381 | agcctcacct accccctcac ctcatcccca ggtgaccatg ctccctgcca aacaggcaga |
| 37441 | actgacccgg cggagccaag cagagccccc tcatccttgg agtcctgaga agagacctga |
| 37501 | gggagatcgg cagctccagg ggtccccgct gccccccagg acatcagcca ggacccctga |
| 37561 | gagggagctg cggacacaga gacctctgga gagtggccaa gcaggcccaa gacagcctct |
| 37621 | gggggtgtgg cagagtcagg aggaaccgcc agggtcccag ggccctcata gacacctaga |
| 37681 | aaggagctgg agcagccagg agggaggcct gggccctggg ggctggtggg gatgtggaga |
| 37741 | gcccagcctg ggggcagcca aagccccgga gggagcatgg gggggcactt ccagggagta |
| 37801 | caaggagagc tgggggcagc cagaggcctg ggaggagaag cccactcatg agctccccag |
| 37861 | agaactagga aagagaagcc cactcacgag cccccctgag aactggggag gccccgcaga |
| 37921 | gtcctcacaa tcctggcact ctgggacacc cactgctgtg ggctgggggg cagagggagc |
| 37981 | gtgtccatac ccgcgtggct ctgagaggcg acccgagctt gactggaggg atctgcttgg |
| 38041 | ccttctccgg gcaccaggag agggggtctg ggcccgtgtc cccagcctgg actgggaggg |
| 38101 | cctcttggag ctcctgcagg ccaggctgcc ccgcaaggac ccagctggac acagggatga |
| 38161 | cctggccagg gctttagggc cagagctggg tcccccaggc acaaacgatg tccctgagca |
| 38221 | ggagtcacac agccagccag aaggctgggc cgaggccacc ccagtcaatg gacacagccc |
| 38281 | cgcactgcag tcccagagcc cggtccagct gcccagccct gcctgcacct ccacccagtg |
| 38341 | gccaaagatc aaagtgacaa gaggaccagc gaccgcaact ctggcaggcc tggagcagac |
| 38401 | gggccccctg gggagcagga gcactgcgaa gggccccagc ttgccagagc tgcaggtaag |
| 38461 | gaggtttcca ccctcccaag ggtagccaga aagtcagccc cactcagcca agtctccttg |
| 38521 | gaaaagcctc cccttggagt agcctaagct cctgcatccc cctccaggct cagacctcag |
| 38581 | cctccctgct gaccacaacc catcccgatc accaaactgg cccaacaatg atgatgagca |
| 38641 | acacagtttt aagcgtttat gggccaagcc ctgatctgaa tgtttgacgt gtgcttttcc |
| 38701 | catttagtct ccttagcaac caggtgagaa atacactatt tacagataag gaaactgatg |
| 38761 | cgcagggtga agccacttgc tggtggggca tgggcaaaac ccaggtctgc tcagtgcaga |
| 38821 | ccacactgag gcctcaagca agatgctctg gccagggcct attcccctcc tggctccacc |
| 38881 | atacctggtt tatgttgtgt ctggtggcac acacctgacc ccacctggga ctgtagccag |
| 38941 | tgtgggcatg ccccttcccc tggtggtact caggtacctg agtccaggac agcctcgctt |
| 39001 | accctctctg gcccctacag ctcctctcag acacagagaa gagggtgcat caatgctcac |
| 39061 | tgggttcagc tagctgccaa gacaggctgc ttaaatgagg gtcgtgtgca aagtgggccc |
| 39121 | agcgccgggc acacagtagg tgctcgccct tcccctgctt cactggtgct ttggtgctgc |
| 39181 | cttgaagccc agaacattct tcatctgaag atggtgggca gggagggtct tggaggccag |
| 39241 | aatcctgcac cctggcaata gctcattggg aggacggcat gtggttttga acaccagcct |
| 39301 | ctctctctct ctgtaagatg gaccaaccac ttctctgacg ggcagcgctg gggtgccgtg |
| 39361 | ggggttcctg cttgtttctc caaagcctcc tcatctccta gatgcaaagt ccaacgccac |
| 39421 | ctgccccagg atgagcaggg cttccaggca tcagggtgca ccccgtgctg ggcccagggc |
| 39481 | cttgccatat gtgcctcaag tggataggag gcagctgcca cttgacagat ggggaaactg |
| 39541 | aggctcagac tccttaggca tttgctgggg gtcacacatg cataggtcgt gagaaatgag |
| 39601 | atcaaagcat ccactccaaa gtttgtgctt ttatttttat ttatttattt acttattgag |
| 39661 | acggagtttc gctcttgttg cccagactgg agtgcaattg cacaatctca gctcactgca |
| 39721 | acctccgccc cccaggttca agctattctc ctgcctcagc ctcccgagta gctgggatta |
| 39781 | caggcatgtg ccaccatgcc cggctaattt tgtgttttta gtagagatgg ggtttctcca |
| 39841 | tgttggtcag gctggtcttg gactcctgac ttcaggtgat gcatccacct tggcctccca |
| 39901 | aagtgccggg attacaggtg cgagccacca tgcccggcct aagtctgtgc ttttagccac |
| 39961 | cacgtcacaa agctcctgag cccatgggag gactggagaa ccctctcccc tgtatttccc |
| 40021 | tgtggctttg atgagttgac cctccaatca actcaatgcg tggacatcag agaagcaggg |
| 40081 | ataagtcagc tcgtcctgcc ctcagattgc tgtcaggctt gttaggaagg cacacagaca |
| 40141 | gctcaaggag gacacggtgc tgtgtcccgg ggcatgctgg gtgccacagg ccggccaggt |
| 40201 | caagaaggaa gttagaaaga ttcttcagtt tcatggtgaa gctcagggtt ctcaggaggc |
| 40261 | taggagatgg tggctgggaa gggatgggag caccatgtac tgaaaggaat ttcacagatg |
| 40321 | acaaaacgag taaccaccag gtcctgctgg ggctccagct gctcctctct atgaaaatcc |
| 40381 | ttggcttggc acagctgggt gcagtggctc acatctgtaa tcccagcact ttgggaggct |
| 40441 | gaggcaggca aatcacgagc tcaggagatc gacaccagcc tggctaacac ggtggaaccc |
| 40501 | cgtctctact aaaaatacaa aaaattagcc gggcgtggtg gcgggtgcct gtagtcccag |
| 40561 | ctacttggga ggctaagaca ggagaatggt gtgaacccgg gaggtggaag ttgcagtgag |
| 40621 | ccgagatcac gccactgcac tccagcctgg gtgacagagc gagactccat ctcaaaaaaa |
| 40681 | aaaaaaaaaa aaatccttgg catggcactc aaggccggct tcccttcctt ccactccgga |
| 40741 | tttgcctcat tggtgctgag ctggctgcag ggcctgtgag cacatatccc tgcctttgca |
| 40801 | catgctcttc cctgttcagc caccaaacgc ctgttcattg tcgaagtctt aggtcaggct |
| 40861 | ccctgtcctg agaagccttc cctgaacagt cactcctagt aatggtcccc ttctgggctt |
| 40921 | ggcagttttg cttccatttg tccatgcaac atccatctaa tagggttgtc atttccccat |
| 40981 | aagctccaca caggcaggat ctctacctgc tttatctctg taactctagc tctggcccag |
| 41041 | ggcctgacat aaaggagggg acagctcagt ggatgcatgc aagatggagg acacaggggt |
| 41101 | cagtgggtga acaatgaatg aatggagggt gaatgtgtga atggatgatg gatcaatgat |
| 41161 | gcatgttgaa tgaataatag acatcttttg gatggatgac agatgggtga tgatggatgg |
| 41221 | atagctgggt gatgaatata tggtggtggt ggatatatga tggatgttgc ttaggtgatg |
| 41281 | gatggatgaa ctttgggtgg aatatgaatg gatagatgtg gcatgggtgg atgaatgtca |
| 41341 | gatgatagat gttggagata tgggtagatg gatgatggat ggagagaggg atatgtaggt |
| 41401 | attgggtaaa tggatatgtg atggatcaat ggagggtaga tacatgaatg ggtgatagac |
| 41461 | aatggatgat gggtacatga gagggtgagt catgtgatag acactggatg gttggatgga |
| 41521 | tacatggatc tactgatgct ggacgttaga tgggtgttgc atggacagat gatagaatgg |
| 41581 | atggatgagg tggacagatg catgcatcct ggagaataag ttgggctaag ctgtgttctt |
| 41641 | tttttaatct ccagttccaa ccagaggagc ctgaggagtc agaaccaagc agaggccaag |
| 41701 | accccctgac tgaccagaag caggcagact cggtagctgg gtcatgggtg tgggtacata |
| 41761 | cggtggggaa gggaggggga agcaggttgg agatgggctt cattcctcag aagagcccta |
| 41821 | gaatcaacca gaccaaagtt ggcattgcca tggggtcatc tatgtgcatg gtggggcctt |
| 41881 | aagaagaggg gctctgcagg agccaccttc tggcttgggg acctgggtag gtgggcgatc |
| 41941 | ctggggtcag aaccctaggc catgcttctc atttgctggg actgaaaagg tcaatgtctt |
| 42001 | tccctgcgca aatgatggtt tggccccagt ggtctctgtg ggaagagatc cttccggttt |
| 42061 | gaaagggcca ggccaggctg aaagagcagg gcttccacga gcaggagcca gagagctgag |
| 42121 | gatgtaccca gtcagccagg cctggagggt ctccagggtc ctggaggcgg gagagatatg |
| 42181 | tgcgggggtg ggacccacgg atgctgctct gaggcctggc tgcagctggt gagcacaact |
| 42241 | ctgcccgccc ctccccgtga cctaccaaac agactgttct cgtcaccctc agcctccaga |
| 42301 | gaggtgagat cagagttgag ggccgtgggg cagtgggagg tgggggagga ggagacagac |
| 42361 | tgtttggggc tgtgttttcc ggtcctgctc ttcctcccgt tgcctcctga agccaggggt |
| 42421 | ggcagggagc gtccattggg cagcatagcg ccccccaagt agggccctgc cgtgagtcaa |
| 42481 | agctggggga attctgccca aaccctcact gtgcagatga ggaaatggag gcaggggagt |
| 42541 | cgtcccaggt tatacagtca gtggctagct ggactgggac tagaacccag ggcccaggaa |
| 42601 | ccacccagcg ctctctctgc acctccacct ggcacccatg ctgcccccgt ccctgccccg |
| 42661 | atttcttgcg tggcttcgaa cggcagtgct gtaacttcga gcagtccagt cttcccatct |
| 42721 | gtggaatggg cggggacagg ggacactggt cgctaaaggc gctgccagcc ctcccaggga |
| 42781 | ctctgacaac tttgctcttc ctctttctgg gttatttctt catatcctgg agccagagta |
| 42841 | gtgaacgagg cggaaacagc aatgccgggg tgcccctcta gtctccatga aacgggcccg |
| 42901 | gcccatcaac gtggaaaata tctcaaccta cccccacccc taggcagcct tgactggtca |
| 42961 | gaactgataa ccacctcatt catgcattct ttcacacaca cttagtgagc accttctgta |
| 43021 | tacccaggtg tgggtcacag gtgagtcgga gcgccatcaa agagttcagt ctagtgagat |
| 43081 | ggttgcatgc ctgtggtcag gactgtgatg gggaatgtgg tagcagggtc gggggcaccc |
| 43141 | ctacccccaa agccctcctg gacctgtgct ttgatgcttc aagttccact tccaaagagt |
| 43201 | ctgcagattc cagagcgagg accctgggct ctctcctacc ttcccagtaa cccatgtgtg |
| 43261 | gctttggaca agtgcctctg cttcacaggg gccttggttt ccccaacgag gatgactcca |
| 43321 | aagagggagc atttgggggc tctgctagga atgtgtgtag aagtccacaa ctcattccct |
| 43381 | ttgcttaagc tggggtcaca aacctaacgc cctgaaggcc aggcaggtaa caatggtgag |
| 43441 | aaggtggggg ggcaccgagg gcacttgtgt gactcctcgg ttccagatag ctgttgccat |
| 43501 | ggggaagacg ggcccagagt ttccacatct ttcgatattt caagaaacac tggagatatg |
| 43561 | tatttatatg tgaaatctct aacctaatgt gaaatactct gaaaacacta tgtgggcaga |
| 43621 | aacatacctg tggtctgcac cccctccagc tggcgcccgt ggtttgactt tagggtgatg |
| 43681 | acgtgcacac cttcaaaggt gctgagccct gggagccttg tcagtccaac acgatgtagt |
| 43741 | gtgaacaagt taaccagctc gtctcggcag ttctgggagg agagaaagat gggaaccctg |
| 43801 | gggctccatg gtggggggca ccacagaatg ggcaggggag gctgtagcca ggggtgcccc |
| 43861 | catcctgcca aagggacctg gggccaacac tggaccctgt ttgacaggca gacaagaggc |
| 43921 | cagcagaggg caaggctggg agcccgctca agggccgact ggtgacctca tggcggatgc |
| 43981 | ccggggaccg gcccacgctg ttcaatccgt tcctgctgtc tctgggggtc ctcaggtggc |
| 44041 | gaagggtagg ctggctccag tggggactgg aggggtgagg gtggatagag acggggatgg |
| 44101 | gagggaggag ggggctgtta agcaaaggag agagagtggg ggctgaggag gaggcaccta |
| 44161 | gggccgtcgc atgacaggag aggtgggagc agagctctta agctcatcct ggtctcagca |
| 44221 | agcgagtggg tttcccactt ccggggcagg cttgggggct gctttcagct tttggagtga |
| 44281 | ggggtgatgg aataatctac acagctgaaa gcttccaatc agcagcctct cgccagccct |
| 44341 | gggccaacgg ggagccaggt atgggggaag ggaaggcgag cttataagtg gctctgggat |
| 44401 | tgcaaagtgt gtctcagacc tgggcctgag ccagtttcac aaacatctgg cgttacgtaa |
| 44461 | cccatcccct gcccagagag gcctggaaac actcaagcct ctggctgggt tttccacaag |
| 44521 | ggcaggcagc tgagacccgc tccctcccac ccgcttcaca gcaggacaga aggggcctgg |
| 44581 | ccatctccag cagccacagg ctggctcatg gggtctcttc tctctttgag aggctgactc |
| 44641 | tcttactcac cgctgttggc tctgagtcca gcactaggct gggcacctca gagacagtgt |
| 44701 | gcccatttta cagatgaagg gactgaggcc cagggaggtg agctgacttg cctgaggtcg |
| 44761 | cacagcttgg ggtataaagg agctgatttt cctcattctc agatgagaga agggttgtag |
| 44821 | ccaaacttac tgagcctcgg ttgccacatc tgtctattag gaaaaagtct gtggagactc |
| 44881 | agggctgcag agagggctca gggagatcag gatgcatgga ggttgcgggg ctgttgtcga |
| 44941 | aacactaact ttcccatcca cttcagaatt tccttttttt aaaaaattaa gacggagtct |
| 45001 | cgctctatcg cccaggctgg agtgcagtgg caccatctct actcactgca acctctgcct |
| 45061 | cccgggtcca agtgattctc ctgcctcagc ctccagagta gctggaatta taggcgtgcg |
| 45121 | ccactgcacc cggctaattt tttgtatttt tagtacagac agggtttcac catgttggcc |
| 45181 | aggctggtct tgaactcccg acctcaggta atccgcccac cttgacctcc aaagtgctag |
| 45241 | gattattggt gtgagccacc acgccaggcg tttttttttt ttttttttta aattaagata |
| 45301 | gagtctcgtt ctacccccag actggagtgc agtggcacca tctcggctca ctgcaacctc |
| 45361 | tgcctcccag gttcaagcga ttctgccatc tcagcctccc gagtatgtgg tactacaggc |
| 45421 | gtgtgccacc acacctggct aatttttata tttttagtag agatggggtt tcaccacgtt |
| 45481 | ggccaggctg gtttccaact cctgacttca agtgatccgc ccgccctggc ctcccaaagt |
| 45541 | gctgggatta caggcgtgag tcacccagct gagcccagaa tttcctttcg ctgctctttg |
| 45601 | tggttaaggc accgagggtg agcaggcaag catggttatc tgagtagtgt ggtaccttta |
| 45661 | agccatgggc aggaattacc ttgtctaact aaaggtcacc aacacacagc acgtctggca |
| 45721 | ggagggggca ggtaagtcct tggtagagcg aaggaggagc gaagcaggga aagcactctg |
| 45781 | gggtaatgat gctggctaac cagcacttat tgtatgccta ctacatgccc agctctgtgt |
| 45841 | tcactgcatg gcgccaccta attgcatttg atccacactc ccaggtgcag ttagacgcct |
| 45901 | actgtccatt ttacagatga tgaagtgaag ctcagagagg gagggtcact tgctccaggt |
| 45961 | cacacaggga gcaaggggca gaactgagat tcagaccctg ctctggctga cctcagagcc |
| 46021 | cagtgcttcc aacacgcccc ctacaccact gccttcacat cctgatctct ctgagccctc |
| 46081 | ctgcagctct gggagtcccc acagattttc cccattagaa agatgcggca accgaggctt |
| 46141 | ggtgaggttg gctacagtgg ttctctcatg tgggagtgag ggaaatgaag agctagggat |
| 46201 | ggaactgcca gcagggcctc ccagttacac agagcagatt taaacttctc ttgggctgaa |
| 46261 | gcagtgaaat tagcccaagg ccaagagcca gaaagcctgg agtcgagttc tggcttggca |
| 46321 | cctaacttgt gtgcccttct ctgagcctta ccttattatt ctcagtagag taacggtttg |
| 46381 | agactggata acctcgaagt ttggtagctc tggtctttgc cagtttaata actcacccct |
| 46441 | gggtccctga ggctgtgctg tctctgacct gccaggatga gttgtggttt cttcattggt |
| 46501 | gcattcattc attcgagccg tgcttacgga ggatgtgctg tgggcttagg ccctaggctg |
| 46561 | gtttccaaga tgtagacaaa aaacattcca gccctggcca ctggagccca gttaggtaag |
| 46621 | gacactgaca tgtaactgat gagaacagtg tggtcaccac tttagtgggg aaaggtacag |
| 46681 | atgtagggag cactgggcca gcagttccta agtctgctgg ggacactttg gcttcctttg |
| 46741 | gtctgagact tcaaggaaga aattttccag gccaacaagc attgggaggg ggaaggggag |
| 46801 | aaagagagag agaatgtgtg tgtgtgtgtg tgtgtgtgtg tgtgtgtgtg tgtgtgtgct |
| 46861 | gggtgtgtgt gagtgtgtgc tgggtgtgtg tgtgtgtgtg tgctggggta cagaagacag |
| 46921 | gaagagaagt gttccaggca cagcagagaa ccatcagggg gtagaaggac ctgtcttatc |
| 46981 | ctgggaattc ctagtagtcc agtgctgtgt atcttttttt tttttttttt ttctgagatg |
| 47041 | gagtctcgct ctgttgccta ggctggagtg gaatgcagtg gtgtgatctt cactcaccgc |
| 47101 | aacctacgcc tcccaggttc cagcgattct cctgcctcag cctcccaagt agctgggatc |
| 47161 | acagccatgt gccaccacgc ccggctaatt ttttgtattt ttaccagaga cggggtttca |
| 47221 | ccatgttggc cagcctagtc tcgaactcct gacctcaggt gatccacccg cctcggcctc |
| 47281 | ctaaagtgct gagattacag gcataaacca ccgcgcccag cctccagtgc tgtgcatctc |
| 47341 | tttatttact tattgtattt tgcaaaattg accaaagtat gtgtctctcc agcctgtcaa |
| 47401 | atgagaatct ggaaggccag gatgacaggc aggagccagg ttgtgatggt tcctgactgc |
| 47461 | ctagaagagg aatgtagcac tgatctgtca gcattggtga tgtgtggaag aactttgagc |
| 47521 | agggaagtgg tctggtcact gtgttgcggg tactaggagg agtcgcaggg gccagaaaag |
| 47581 | cctggaggag gctggtgctg ttaggtgccc agggcactgg accaggaccc tggtggtagg |
| 47641 | tgaggtctcc tgcgtgttca ttcactctcc caaggactga ctgcctgagt gaggtgcaag |
| 47701 | ggtagggtga gaaaactcag cccggggtgc cagaaggcca gtttctagag ttagatggac |
| 47761 | ttaaccttgg cctcattcct catggtggag agactcctgg cagcaaatgc tgggaaagaa |
| 47821 | cttcagctcc ctgggcctcc atttctttat ctgcaaaatg ggaacagtaa ttataaaagc |
| 47881 | aataattttt ttttttgaga gggagtctcg ctccgtctcc caaggtggag tgcagtggca |
| 47941 | caatctctgc tcactgtaac ctctgcctcc cgggttcaag cgattctcct gcctcagcct |
| 48001 | tttacatagc tggattacag gcgcctgaca ccacgcccgg ctaatttttg tatttttagt |
| 48061 | agagacgggg tttcaccatg ttggccagtc tgctcttgaa ctcctgatct caatgatcca |
| 48121 | cccacctcag cctcccaaag tgttgggatt acagacctga accaccgcgc ccggcaaggg |
| 48181 | caataatttt tgaaccccaa atcaagatga cagaataatt gaaatgccaa ttattccaag |
| 48241 | cttccctgcc tccttgccta aggatagcta atgagggata aagaggttgt cctaggtgcc |
| 48301 | ttacttgaat taacacttaa tccttccagc aacctcatga ggtaacagca ttaccccatt |
| 48361 | ttacagagag tgaaattgag caccgagagg tgccttgctt aaggtaacac taggctggaa |
| 48421 | tccccgtgcc acacgaactt cctagtgcat ttagcaacca attccaccac ggtccctact |
| 48481 | cacctgcagg aaaagagcat ctaacaaacg gcccagcgtt ctgggaacct gagcaacggg |
| 48541 | tgcacgccca cacctgaaaa accccaaacc aaaaaagacc catttgtgag gagtgggcat |
| 48601 | ttgggagaga ccctgccatc caagaactca ctttgtgtcc agcttactcg ctaggaattc |
| 48661 | cgcctcttcc tgtgtgacct cgggcaaatc ggctcacccc tctgagcctc cgttttctca |
| 48721 | ttagcaaaat aagacctccc tcccaagtct gtggtgagga cgaaaatcga ctcttggcga |
| 48781 | gtgggacccg ctgagtcgtt agtactgggt gctttgcccc ggtccccgcc aaatcacggc |
| 48841 | gccgagccct agcggaccca tcgctccggg gccgggtcgg gaagcgcagc ctgggcgagt |
| 48901 | cgtgcccacg cccggccgcc cgcatcctcc gcccccgcgc cattgccgga gtcacctgca |
| 48961 | ccctgggccc ttccttcctc ccagcgcgcc cgcggcccgg gcccgcccgc cctccggccg |
| 49021 | ccaccgccct cccttccctg cggccccatc cgcccacccc gccgtcccgc cgtcccgccg |
| 49081 | ccccgccgcc ctagcgcgcc cgtcccgttg cggcaggtcc cgcccccggc ccgtctcgcg |
| 49141 | cttccattgg cccgccgcgg cccccgccgc tgtttgtctc ggcttccccg ccacccattg |
| 49201 | gcccgctcgg gtcctcccag gaagtttgaa aaaaaaaaaa aaaaagtttt atgggcggat |
| 49261 | ggaaggggcc ggggcagcgt cggggaaagg aagggccgga ggcgcggcgg cgggcggccg |
| 49321 | agaggggcgg cggcggcggc ggcggcgggg ttcccgcgcc gcggagcccg gcccgagagc |
| 49381 | cgcgtccacg ttcctgcctc ctgctcccgc cgccctgggg cgccgccatg acggtgagtg |
| 49441 | ccccagtcag ccgcccgcgc ccgaggccgg gagaagggcg acgacccgag gcagagccca |
| 49501 | gcctctcccc tccggggcag ccccctcctc atttcccgaa ggcgagagga gggctgggcc |
| 49561 | ggaagacggg gccacctccg aagcgctttc ggccagaccg gcctcaccct tcccgcaggc |
| 49621 | tcctcctcgc cttccctcgc ccactcgccc ccgggagccc aggcgaccct gaggggacgg |
| 49681 | aacgacccgt ctcgggcgcc ccctcctcac acttgcggca ccagtcacgg gtggattcgg |
| 49741 | ggcgaccctt tcccacctcc cctccagccc cctagacgaa gacccgattc cccaaggcgg |
| 49801 | ccaggggccc cagggaggag cggaggtggg cctgggctgg ggaggggcgc tcgtgggtgc |
| 49861 | ggatgggtcg cgctgacccg ggcctgggca agccagccct ccgtgtggcc gctggcccga |
| 49921 | ggtcgggtgg gcgagaagtg gccggaccgc cccacccaca gcccgggagg cagtcccggg |
| 49981 | acgtctgaag cagcgggata ccacgtcttc ctgggcttgc actttgcagc ggtcctgggg |
| 50041 | ccttgggaca agcctgcgag tctgagtagg gggcatgatg gcaggggttt gcctttctca |
| 50101 | tgggggtgag ctgtacccaa gccccatcaa ttacctgtgc catagttagc atattgagcc |
| 50161 | tcacagctgg gttcgctgga ctccccactt cacagccaga taaactgagg cttggggagg |
| 50221 | ggcgctggtg agttgcccga ggtcacccca agtataagag aaggagtagc tcctttccct |
| 50281 | gtccttctgg cccactgacc gtgatgttcg ggaagggagg ggtggggctg cttttggttt |
| 50341 | ctggctagtg cttcagggag gctctgacag cccagtggcc ctcctggggg aggatgagca |
| 50401 | gggtgtgtgt gtgcacaggc ggcagtaggc ctctttcagg ggagtggaga ccctgcggag |
| 50461 | gagtgggtgg gctgctgggg gcgggctggg ctgctggggg gcgtggcacg cctagcccct |
| 50521 | gccctgtgag tgtgatggcc tggacttcct cggcgtcctc ctggacatcc tgccacctcc |
| 50581 | ctgctggccc ttcctgtcgt cagcagcctc cccttttctg tcaggagcag aagggatgtg |
| 50641 | gggggaggag ctgagtcagt gtcctggggc caggaggaga gaagttgcct tgcccaccgg |
| 50701 | gtgcctgccc ggccctcagc cgggtgcttt cacgttacca gatttgatcc ttgaaggttg |
| 50761 | gtagtaacat cttaatcaaa cagatgagga aaccaaggtg tggcgaggtg aagtgtcatg |
| 50821 | ccccaggtaa ctcagtgagt cccaggctaa gccagaattt gtatccaggt ccgttccagc |
| 50881 | tttctttcac agttgcctgt cctgggggca gcacgtgctg agcaagggta aggctgccgg |
| 50941 | aagcagcgtg tggggtgctt ggaagatgga cagcacatcc ctgctggtgg cagcagcctt |
| 51001 | cctgagggag gtgtcctcct gtgattatag ggccttgtca ggtggagatg gactagcgag |
| 51061 | gagacagcag tgtggacaga aacgggtggt catgtttgag aagtagcaag agcgtaggga |
| 51121 | aggggtctgg ggaggagggc ctcactgcta gggcttggac aggggcaata gagagccatg |
| 51181 | aaagctttta gagcagagag gaggctatga tcaccattaa tagtgttcat tgagttcatc |
| 51241 | ctggctgcca tgcagacctc agcctgctct cagctggtgc tcctcctgta cccacctcac |
| 51301 | accctcctcc cctggccccc gtgccctgaa tcagggatcc atacagagca agtggcacag |
| 51361 | gtgtgtgagt gtgtgaggct ccggggcttc agggagttgg gattctcttc cacccctttt |
| 51421 | gcctttgcct gggtgcagct ttgctcccgg atcagccttc cccctcgcct gctgggcatc |
| 51481 | aaattatatt tggtcccttg tttactgtct ctttcctaca gtccaccagg gcaggggcca |
| 51541 | cagctcttgg tcacagctaa tttcctggcc tagaacagtg cctgataact ttaaaaaaaa |
| 51601 | attttttttt ctgcaaacac tccctgagcc cctatctgtg ctgggtcctg gcaggtaaac |
| 51661 | agtgtatgtc cctgactgtg agttgcatct aatctagcct gtgaaggata agtaaagggc |
| 51721 | ctcaagatag tcacggatgc aacagaggcc tctgagaggg gccatgggag ggcaggacgg |
| 51781 | gggcggctgg tggtgcggtg agtggcatga actgtgaagg gacctcagag gtggccatta |
| 51841 | agctgggtct taaggcctga gtagccgctt gcctagtcat cggaggagga ggaagcatag |
| 51901 | tgtttcaggc caaggacatg gcacatatga agggcccgga gtcctggtgt gttgtgatcg |
| 51961 | gcaaggaata tgcagtggta taaacagggg cccctcagca aggggaggcc aggctggaag |
| 52021 | agtgtgatga ggcttccctg ccatcctgag gcagctggac tttgttttaa agccacctgg |
| 52081 | agaccgggtg tagtggctta tgtgtgcctg taatcccagc attttgggag gctgaggtgg |
| 52141 | atggatcact tgaggtcagg agttcgagac cagcctggcc agcatggtga aatcccatct |
| 52201 | ctactaaaaa taaaaaaatt tgctggacat ggtggtgggt gcttgtaatc tcaggtattt |
| 52261 | gggaggctga ggcaggagaa acgcttcaac ccgggaggtg gaggttgcag taagccgaga |
| 52321 | tggcgccatt gcactccagc ctgggcagca gagactctgt ctcaaaaata aagcaagcca |
| 52381 | cctggagccg tccctggaac tgttaagcaa gcctgggata ccaagccttt ttgagtgagt |
| 52441 | cccgccagcc cgagggtgtg tagaggggtt gtgtgcctgg ccaggtagga ggcggggctg |
| 52501 | tgagaacctg ccagtactcc cgaaaggcgg aaggagaaac tgagcttcta gcaggtgaag |
| 52561 | aagaggtagc tgggcctgaa gagccctgta tgaaggggca tcgtgggaga tttagatgat |
| 52621 | cggacctttt gaccctgggg acaggtttcc ctgccagttt aaaaactcac attggttggc |
| 52681 | cgggcacatt ggctcacacc tataatccca gcatttttgg aggccgaggt gagcggatca |
| 52741 | cttgagctca ggagtttgaa accaacctgg gaaacatagg gagaccccat ctctacaaaa |
| 52801 | aaaaaaaaaa aaaaaaaatt agctgagcat ggtggagtgc ttatgtcgtc ccggctactt |
| 52861 | ggaagctgag gtggaaggat cgcttgagcc caggaggttg agtcagcagt aagctgtgat |
| 52921 | cacaccacca cactccagtc tgggcagcag agcagggccc tgtctcaaca aaacaaaact |
| 52981 | caaattggtg accttctatc cccaaggtca ctgtgtcatg gcgtgcctga catggtatgt |
| 53041 | gatgtgtctg tactgggctc tggaggatca ctaggtttct ccttgtacag acacgttcag |
| 53101 | tcctgtcgga agctgcggga ggggaggacc gccccgtcat ttgccacatc aggcagccag |
| 53161 | gactcagaga ggggatgtga cttaggaagg tcacagtgac tccacttccc aggcagccct |
| 53221 | agaggttcca gcctgacagc ttgtcattcc tgccccaatc tcccagccct ggcccaggga |
| 53281 | ctttcgcctg ggactgccca gtggtgccag ctctgtgggc ccaggaagcc tggctcctcc |
| 53341 | gggctaggtg ggggtagggg agatggccca aaaagcacag aaatttagac cagggggtag |
| 53401 | atatttcctc agcaagtttt tcctgagcct tgctgtggtc aagccccctg caaggccctg |
| 53461 | gggccacagg aggtcccaga ctgaggggaa gtggagccag gtgtggtcac caatcttcat |
| 53521 | tcttagcttg ggatcgccct gggcagcctc cgtctcaggt ggaagacggg gtgggcagaa |
| 53581 | tacagagcag cgggacaaac gcagccccag gggttctcgg ccgtgagcag agcctgtgtc |
| 53641 | tctcccttag acaggtatac agggaggggc tgggatgcca acctactggg tcccccgact |
| 53701 | gtggctgtgg aaggttctgg atcttcagct gtcccaagcc ccggttggtc cacttcctat |
| 53761 | acctgagaag gggctccgtg ggtggagagt gggtcgggag aggtggccag gcagggtggc |
| 53821 | tgtggtttcc agctgccact gtcaccgccc actccactga gccatgccac ccgttctctg |
| 53881 | caggcaacca gacaccttgg cctggtgagg cctcgatgta ggggctgata ggtaggctca |
| 53941 | gagccatggc aaccggtggc cacctcctcc ctgccggcgc caggagcgga gactgcagag |
| 54001 | ggaccgggac ttagatgaga gaggtctccc cagcaggaag ggagggtctg gtggttggca |
| 54061 | cccactagat gagcatggtc agaaaaatat caggatgagc aacttcttta tctaggcctg |
| 54121 | ggtgggggtg cctggcacag gtctccatgg gacatgctgc agctggtagc ccccagaccc |
| 54181 | cggggctgtg cccccctggg cggcacccag aaggtagggc ttgccaggac tgacccttcc |
| 54241 | caaagagatc taggcgggga ccagagggtt tctgacccca gcctgtgact ggctccacct |
| 54301 | cccatagtct cctggagccg aggaaaggac aggactggcg ggcccatggg agggtccgtg |
| 54361 | gggcacttgg tcctcgtcag agggaggaac tggacagttc gcgcagtgct gctggtctgg |
| 54421 | actgccctct gagctctcag ggggtctcta tgcaggcaga gtcctcccag cccctctctc |
| 54481 | ccattcttgg gcgaggggtc ggctggagag aggcccctgg gacatctggg tgtgtgtgcc |
| 54541 | agccacccag cccaacttct tggctctctg agtgccacta tcaggaaagg ggccagggct |
| 54601 | gcctcagtgg ctgggaggcc tgcttggact tgggggttac ctagggcctt agccctcttg |
| 54661 | gctggcttcc caggagctcg gtcccacagg acttggggac agggtgggtg cagcacgctc |
| 54721 | ccctcaccag cccccattgg cttcctgctg gacccaactc acctccctcc tcatctcccc |
| 54781 | acagcccgat ctgctcaact tcaagaaggg atggatgtcg atcttggacg agcctggaga |
| 54841 | ggtaagagga ctgaggccgg aggggaggaa gctggcttgt gctgctgctg ggcccctggg |
| 54901 | cagcccagga gtgggggtgg ggctggggct ggtgtgagaa ccctgggggt ggggctggga |
| 54961 | ggggtggagg ctgcccatta ggcttctgcc tcctggagca gtctgcagtg tgtaaaaggg |
| 55021 | atcacagcaa ggggccgtct agcccctcac acccagtgcc ccatcccttg atctcatcaa |
| 55081 | gagtctcttg gccctgccac ctcagtagga gcctgggtgg gagtcaaggg tcttgggtgg |
| 55141 | aagggctcgt agaagctgtc tggcccgaga cacagattcc taaagcctgg tctgaggggg |
| 55201 | gtggggctca gggcgcaggt gctggggttt cacccacctg gatccccact ggttgagtca |
| 55261 | aagcctcctc tagtcctcag tggccacgtc tgtgacatgg gcataatgga taatggtgat |
| 55321 | tctttctaga gtggataaca aggtcagaga gatcaagcac gtacaggtgc cacaaagctc |
| 55381 | ctggcactta ctgtgggctc agctaaagac ccttcccttc ctctggcata tgtgtccttg |
| 55441 | gaaccagcag ggacagtggc tgtttcctca gctctgttct ttcggctgcc aggctggctc |
| 55501 | cctgcccaca ctgcctgggc aggagcgtct ccccacccct gccctgcatg cgcctgctgc |
| 55561 | tctggtctgc gtgcagcctg catgccggag agggctttga gccagagggg atttcattgt |
| 55621 | gtttccggcc cacatgtttt attccctcca gcccacagcc ttccctaccc gctgcctgcc |
| 55681 | cgctgtccct ggtggctgct ctctaggctc acacaaagcc cggcaccccg ccagtgaccc |
| 55741 | cttcctggcc tccccaccca gggtccccgg agggcagagg gattacaggc cccacccaga |
| 55801 | gctggccatt agtcatcctc tatcacaggg ttctggaatg tccgaactgg aagggccctg |
| 55861 | ggaattcagc cagcccaacc ccttggtgca cagacaggag acgggcccat gagggtgttg |
| 55921 | gtctcttcca ggcctaggag cacctggggc agacccaggc tcagaactca gcgcacctga |
| 55981 | ggcccatgga gctccaccca gcttccatct cagacagtca taggctaggc ctggaagagc |
| 56041 | taaagaaacc tcttggcata gaacccctgt cctactttac agagaggcaa ttgaggtctg |
| 56101 | cagcagcaac tccgtttact tagtgagagg aaaatgcttc taagaggcct ggcctcccag |
| 56161 | aacaaaccca gcaacctggt tggtgtccat ccctatgcca agggccatga cagccatcca |
| 56221 | cacaagagag gatgggcgcc gctcgcctca ccagaaggtc taggcacttc tttttttgtt |
| 56281 | ttttattttt gttttttttt ttctgaggca gagtttcact cttgttgccc aggctggagt |
| 56341 | gcagtggcgc aacctcggct cactgtgtct tccgcctccc gggttcaagc gattctcctg |
| 56401 | cctcagcctc ccgagtagcc gggattacag gcatgcgcca ccatgcccat ctaatttttt |
| 56461 | tttgtatttt tagtagagac agggtttctc catgttggtc aggctggtct cgaactcctg |
| 56521 | acctcagatg atccaccctt ctcagcctcc caaagtgctg ggattatagg cgcgagctac |
| 56581 | cgcgcccagc tatagggact tcttagtagc cctactttat ggttcagaag actgaagctc |
| 56641 | agaaaagtgg agacacttgc ctaaaggcac acagagagaa agggaactct tggatacaaa |
| 56701 | actccttttc tcagggaggc aatgtggaaa gaagcagaag gtatcgtcgt tgcatgcccc |
| 56761 | ttgagaactt accatcttct tgaggagaga aaactaagta cttgaaacaa ccaacagcac |
| 56821 | agacagggct tggtgatgtg agggaaccct gggagggctg gggaccgggt gatatgcact |
| 56881 | gaccctggca gtgggcgggc cgcgactggc attccagtgg agtgaccaga agcccagagg |
| 56941 | tgggctgggc ttggcatact atcaggctgt tctggcgccc ccaccccttt cctacatgtc |
| 57001 | ctgccaatct aaccccagct ggagcagaga caggcactgc aggaaggcac ccaatcacaa |
| 57061 | atcctaaact tacagcttag ggcgctctca cctgctgcgg atgtgggtag ccagcctaca |
| 57121 | gttcaagaag cagaccgtgc atctgggcgc ggtggctcac gcctgtaatc ccagcacttt |
| 57181 | gggaggccaa ggcaggtgaa tcacctgagg ccaggagttt gagaccagcc tggctgacat |
| 57241 | gatgaaaccc tatctctact aaaaatacaa gaaattagct gagcatgatg gcgggcgcct |
| 57301 | gtaatcccag ctactcggga ggctaagaca ggagaatcac ttgaactcag gaggaggggg |
| 57361 | aggttgcagt gagtggagat tgcaccattg cactccagcc tgggcaacaa gagcaaaact |
| 57421 | cctccatctc aaaaaaaaaa aaaaaaaaag gcagcagatt gtggctggca ctcactccta |
| 57481 | ctccagggct ccatccagtc ctacttccca ggggaccatt gtccctgacc atggtgatga |
| 57541 | tctgggggaa tatggaaaaa gacgtaacgt cctggccccg ctgagtccct gacttgctta |
| 57601 | cacaggtcat cacccctccc tgtctgcact gggtccgggg tgcctgagga gccttggcaa |
| 57661 | tcttaaaagg agctccaaga aggaaaggga gggtgtggtt acggagggga aaccaatcca |
| 57721 | tttcacagat gctacccctg aggctcagag aggaaatgga ggggccaggt ctcaaattgg |
| 57781 | cattttccgc ctccccaccc ctcctgtgtg cagcatagtg agtttggcag ccacacagga |
| 57841 | cacctgtaca atcacacaca ctggctcttt cattccatcc tccttgcagc ctccctcccc |
| 57901 | ctcgctcacc accacctcta cttcgcagtg gaagaaacat tggtttgtgc tgacagattc |
| 57961 | aagtctcaaa tattacagag actccactgc tgaggaggtg aggccatggg tgtactgatg |
| 58021 | aacccccgga agggcctggg gtggcctggc tgggttcact ggggtgggtc acaccagggc |
| 58081 | ccacacggac catagtgggc cctcttgctc caggcagatg agctggatgg tgagatcgac |
| 58141 | ctgcgttcct gcacggatgt cactgagtac gcggtgcagc gcaactatgg cttccagatc |
| 58201 | cacgtgaggc tgtgtgcagc ttgggggctg gtggtgggca gcatggctgg aggtccctgg |
| 58261 | gggaggtttt ggtgttgaac atggctcacc atggagactg gatcccttca ctcatttacc |
| 58321 | cagaggccct atcttcagag ccagagctgt gatgccaaca cttagcatat ctgggggaga |
| 58381 | cgctggagcc agcagggctc ttcccaggcc aatggaaggg aggttttgta ccccctgccc |
| 58441 | accccagact caagacctta gatgcatcct gggaaggaag ggccaccctc cctggggtcc |
| 58501 | atagtgggga gggagtcatg cggctggcca tgtggcaacc tacccatgcg gtggccttgc |
| 58561 | agaccaagga tgctgtctat accttgtcgg ccatgacctc aggcatccgg cggaactgga |
| 58621 | tcgaggctct gagaaagacc gtacgtccaa cttcagcccc agatgtcacc aagtacgtac |
| 58681 | taagctggac tggggccttg agggaggcac ttacccttgc gtccccgagt gggtttctag |
| 58741 | gtactcacct gagggctgca cctttctggg ccctcgtttc tctgtcaaca acatgggaag |
| 58801 | agagtagtga gcattctcgg tatcatccag aagtacactg agggtttgag gtttgatctg |
| 58861 | tcttctcaaa tgtgatgggg cctcttctct ttggaggaga tgcctgtgag tcaaaagccc |
| 58921 | ctgccaggtg gctgttctgt ctctgtgtct gtgccgtggg ggccgtgtct aagcctgtgt |
| 58981 | taggaagggg tggttaggta gttcagcctt ggcgcccaca cctcccggga tggggagctc |
| 59041 | actccttctg gaggctgcca cgggcactgg ggcaggaggg ctgagttacc gagtggcaga |
| 59101 | gccccccaca gtttataccc agatgcccat ggcgggctgg gacttggagc tgctgggcag |
| 59161 | cgggaacaga gtgtggtatt aaagggggct gggctgggtg tagtggctca cacctgtaat |
| 59221 | cccagcgatt tgggaggctg agatgggagg atcacttgag ctcaggagtt caagaccagc |
| 59281 | ctgggcaata tagtgagacc tcgtccctac aaaaaattta aaaatcagct ggccgtggta |
| 59341 | gggtgcgcct gtcagctgag gtgggaggat cacctgagcc cggaggccga gtcccccaga |
| 59401 | ctggccacac cgcggctatt cagccttagg ccagaggctt tcctgtctag gtttcagagt |
| 59461 | ccccatctgt cacgttagca tgtcatgtct gtacatgtgc caggatgtgc ccagagcact |
| 59521 | ttgtgaactc tgaagcactg tgcagttgga ctgttattta gcatctaggc ccagctgctt |
| 59581 | taagaaagaa accccgggca cagtaacttc atcgagatag atgttcatgt ctcccttcag |
| 59641 | aacagccccg aggtatgcag tcctggcctg gtggggctcg ctctgccgtt tcaggggagc |
| 59701 | cacctgccac acccactcgg cagcctatag tcacatggct acaagtagct gtgggaatac |
| 59761 | tgcgagtgta gtttttggca gggtgaccac gtacccagct atgactgtgg ataaagagaa |
| 59821 | ttgccatagt tgttcagagt ctctgcaact tgtgttctgt gcaccccgag gtcccgcctt |
| 59881 | caccccatca gcagtgactg ggcatccccc ttgccactgt gagcctcggg aacctgggac |
| 59941 | attggtctcc tacatcacct cattgatcac catttgcaaa aagccccctg cctgctttcc |
| 60001 | acgttcgccc accctgtcct cacatccatc ctgtgagagg cgtcgctgtc ccacattaca |
| 60061 | gatgaggtca ctgaagctca aagagggcaa agagaccagt gtggtggttc acgcctgtaa |
| 60121 | tcccagagct ttgggaggct gaggtgggag gagcacgtga gcccaggagt tcgagaccaa |
| 60181 | cctgggcaat atattgagac cccatctcta tcaaaaattt aaaaaattag ctgggcgtgg |
| 60241 | tggtgcatgt ctgtagtccc agctactcca gaggccgagg caggaggatc acttgagcta |
| 60301 | aggagtttaa ggctgcagtg aactatgatc acaccactct acttcagcct gggcagcaga |
| 60361 | gtgagaccct gtcccttgaa aaacaaaaac aagaacgggg gcgagggaag ccgggcatcc |
| 60421 | tggtgggtcc ctgggctgtc aagaggtgga gctgggatgt tcctggggtc tgttaaccag |
| 60481 | gaagctcagg tcgggctgct tccttccctg gggtctgtct ccagcccctg gcacagggcc |
| 60541 | tggcacacag gtgtcgctcc aaaagtgctc attgtgggac tgcaggggtg aggacccacc |
| 60601 | tgacgtggct ctgctggtgc cctaggctct cggactctaa caaggagaac gcgctgcaca |
| 60661 | gctacagcac ccagaagggc cccctgaagg caggggagca gcgggcgggc tctgaggtca |
| 60721 | tcagccgggg tggccctcgg aaggcggacg ggcagcgtca ggccttggac tacgtggagc |
| 60781 | tctcgccgct gacccaggct tccccgcagc gggcccgcac cccagcccgc actcctgacc |
| 60841 | gcctggccaa gcaggaggag ctggagcggg acctggccca gcgctccgag gagcggcgca |
| 60901 | agtggtttga ggccacagac agcaggaccc cagaggtgcc tgctggtgag gggccgcgcc |
| 60961 | ggggcctggg tgcccccctg actgaggacc agcaaaaccg gcttagtgag gagatcgaga |
| 61021 | agaagtggca ggagctggag aagctgcccc tgcgggagaa taagcgggtg cccctcactg |
| 61081 | ccctgctcaa ccaaagccgc ggagagcgcc gagggccccc aagtgacggc cacgaggcac |
| 61141 | tggagaagga ggtaggcacc acggctggct ctctaggagg ccccttgccc cagcgcccct |
| 61201 | ccagtccctg cattcatgcc ctggcatttg tcttgcactc ctacagtgat ggggagctca |
| 61261 | cccctgatct gctgtgagtg tgcaccccac actcctgcga actagaatct tcttccttag |
| 61321 | accttagtag tttggtttgg ttttgttttg ttttttccta gttctgccct tagcagccat |
| 61381 | agagaagaga agtgggaaga gaagggagag acctgccagg ctcacacctg taatcctaac |
| 61441 | attttgggag gccaaggtgg gagggtccct tgaagccaag agtttgagac cagtctgtgc |
| 61501 | gacatggcaa aaccccatgt ctacaaaaaa atacaaaatt tagctgggcg tgctggtgca |
| 61561 | tacctggagc cccagctact tgagaggctg aggtgggagg atggctggag cccgggaggc |
| 61621 | agaggatgca gtgagccaag atcaagccac tgcactccag cagtctggca atagagcccg |
| 61681 | actttgtctc agattaaaaa aaaaaaagaa gaagaagaag ggcgagaccg tttattgttc |
| 61741 | atcttctgcc cgtggcctcc ctgcctgcac tgactcgtgg aatcctcaca gcggcctcta |
| 61801 | cccctagggt ggacttcagc agttttactg acgggaaaac tgaggctcaa agatgtttcc |
| 61861 | tctgtcacct ccatgatgtg taaacatctg tgaccacagt ttccttttcc tatccctgtc |
| 61921 | tagccttctc tgggccaagg ctctcccagg tcattgacct ggccatccag gaaacagccc |
| 61981 | agcgtgtccc ctggctacat ctcactccag ggctgcttgc ccttctcaaa ccctgaggca |
| 62041 | ttcctaagcc ttccagggac gctgggcttg tatccgtgtg gagctggaag cctgcgggct |
| 62101 | cctcactgcc ttccaccagc cctgccccag cttccaggtc ccactgacca cccttctccc |
| 62161 | tcgtaggttc aggctcttcg ggcccagctg gaggcgtggc gtctccaagg ggaggctcct |
| 62221 | cagagtgcac tgagatccca ggaggatggc cacatccccc cgggctacat ctcacaggta |
| 62281 | aggccggggg gctgtttttc agggggaggg ggcagatttc tgcttgccgt gttatcagga |
| 62341 | aacagctgag attttgggag cccttcctgt gtgtgctgga acctgtgtgg ggcatttgac |
| 62401 | atgcgtcatc tcatttactc tccccacagc tggtgggcgt gatcactgtg cccgttttac |
| 62461 | agacaaggcc actgagctct gagaggttat gtgacttgcc caaggtcacc ccgcctgcag |
| 62521 | gtctcaaagg tgggatttga gcgagggtcc ggctgactgc agagcctgtg tgtgagtccc |
| 62581 | cgtgtgacac tctgcacttg gacccttgcc ccggggaagt ggggggctag tggccccgag |
| 62641 | agtcactccc tgaacacagg gaaatcctgc cgaggcccac tgggccaagg ccccacacaa |
| 62701 | ggaggtctgc aggacagggg agcctccagt agccctcaga gaatgcaccg tccgcctagg |
| 62761 | acagcggttc tcaacggggt ccattttgtc ccccttgggg acatttggct gtgtctggga |
| 62821 | atacttctgg ttgtcacaac taggacaaac taactctcta gaaaaaacgt gtgtgtgtac |
| 62881 | acatatataa gtttattata aattttacca ataaaaacaa tgcttagtac acaatttaca |
| 62941 | aataaaaata tataatttta ttgtgaattc cgtacagcaa atggattttt ctcagaatgc |
| 63001 | tttcagtgat tttttccata ctcttgtatc cacaactgat taacaaaggg ggttgttcta |
| 63061 | acgtgtgctg gttgacattt ttgtttatgg taatgagtaa gatgagaaga catttgtcga |
| 63121 | aactttactg gtccatgttg tcagctactt ctttgctaga tcggatagta gttttctatt |
| 63181 | gagaatattt gagaatattc tattaagaat atttttgcaa ttttttgttc tatttacaat |
| 63241 | gtaatggtta tagatgtgag atacttctaa gtttaatctg cattattagc attttcttat |
| 63301 | cacttgctta agtctagaca atcaacaaaa caataaatca agccctgatg tgtaatgttt |
| 63361 | accaattctg cagtgtaaat actcccgctg tggccaatgc tgcattacca gcacaaagtc |
| 63421 | cctggacaga gagttgggaa gagatgtcac actattcact aggatttcca ccatgcggat |
| 63481 | acagtagatg tgattggccc caagagcacg cataatacaa cacagtgaaa tatttaggaa |
| 63541 | gtaataaatt tgagtatcta ttgccttgtc tttaacatag ttaatttaaa gtatataaat |
| 63601 | ttaattgtta atggctgtgc ttaacaacta catcacagaa ttactaaaaa tttgacaatc |
| 63661 | agctgtctgt agttatcaca ccattatcta aagtagaaaa gaaggggcca ggcgcagtgg |
| 63721 | ctcacgcctg taatcccagc actttgggga ggccgaagtg ggcagatcac gaggtcagga |
| 63781 | gaacgagact aacctggcca acatggtgaa actccgtctc taataaaata caaaaaatag |
| 63841 | ccgggcgtgg tggtgcgcac tgtagtccca gctacttggg aggctgaggc aggggaccca |
| 63901 | ctggaaccca ggaggcgcag gttgcagtga gccgagattg cgccacggca ctccagcctg |
| 63961 | gcgacagagt aagactccat ctcaaaaaaa aaaaaaaaga aagaaaagaa aagaaggctg |
| 64021 | agatctaggc cctaggcagg aggagccttc taaaaatttc caaggggagg tcacgtcatg |
| 64081 | agggggctct caggaaggca ttggctgggg catgagaagg aaggctggtt ggtgcgtatt |
| 64141 | gtggatgcct ccagtgctga gctaatagtt agaagctctg gcctggtacg gtggctaatg |
| 64201 | cctgtatctc agcactttgg gaggtgaggt gggtggatca cttgaggtca aatgttcgag |
| 64261 | gccagtgtgg ccagagtggt gaaaccctgt ctctactaaa aaaaaaaaat acaaaactta |
| 64321 | gcagggcatg gtggtgggcg cctataatcc cagctactcc agtggctgag gcaggagaat |
| 64381 | cgcttgaacc cgggaggcag aggttgcagt gagctgagat cctgccactg cagcctgggt |
| 64441 | gacagtgaga ctctatctaa aaacagcaac aaaaaacaaa acaaacaaaa aaagagaagc |
| 64501 | tcattccaca gacttttgga ggtttggggt cagacagtga catcaggaaa gtgatgttgg |
| 64561 | agtggagggg gcttgggaga gggccaggtg taaggcatta ggaaatggct gaaggagggt |
| 64621 | gaatgtcaag ggtctggagg gaggagaatt tgggactgga tgaccagatc tacggaaggc |
| 64681 | agaggggcct ttgggggccc tgaggctggg gctgctgctc cagggaagcc cggagaccgt |
| 64741 | cctggggcca agtagtggat ggagtttcca ctgatagagg agcaggcagg ggaattgggg |
| 64801 | tgggacgcag agggtgaggc tgggggctta ccttgtcctg gggaggggca ggggaggagc |
| 64861 | cagtgttgtg ccctgtagcc tcccaccctg aggcagagaa gggagctggg ggcccaacac |
| 64921 | cccagctgag gcaggtggga gggcctccga ggcccccagc cagggggctt ctgcctgcgt |
| 64981 | gctctgctct aagaagctgc aggggctgct ttctgggtgg gtggggctgg gacccattcg |
| 65041 | tacccaccta taatcagagt ggcttcatct tcctccattt tattttattt taattttttt |
| 65101 | agagatgagg tcttttactg tcacccaggc tacagtgcag tggcacagag gctcactgca |
| 65161 | gcctcgaact ctagggctca agcagtcttc ccacctcagc ctcctgagta ggaaccacag |
| 65221 | gctacaccac catgcctggc taattaaaaa aatttttttg tagagacaag gtctcactat |
| 65281 | gttccctggg ctggtcttga actcctgggc tcaagtgctt ctctcatgtt ggcctcccaa |
| 65341 | agtgctgggg gtacaagtgt gaccactgca ctggcccacc tttgtccgtt ttactcatag |
| 65401 | agccagcttt agatttcctt tagataaagg ctctgccact acaatgacgt ttaaaaggca |
| 65461 | ctgctttggc ttctcagctt actggtggca aaactgaggc ccacagaagg gtgtgacctt |
| 65521 | tgagctatag gcagacctgt gtctggagtt caggcggtct ggtccccagg tgccccattg |
| 65581 | ggtgcaccaa agtctgtcag tgtttggtcc cgttagggtg ggatgggcac ggggagcagg |
| 65641 | tgggagggga gaagggaata actggggagc agagctgaag accaggcagg tggaggagtg |
| 65701 | accccagatg cggaaggcag cagagaagaa gagctgagtc atctgtatcg ccctcaggca |
| 65761 | cgggaggagg cggatggaaa ttcggtggac ctggaggagt gacagctggg agggattccc |
| 65821 | cagctggtat ctcgggctga gtgggtgccc ttccttcagg ggttgggggc ttgctgctgc |
| 65881 | acgacagctg tcgggtggtc tggggcttca cccactggac atctggtaaa gagaaccttt |
| 65941 | ccccactatt gcagtgggga cagaggcatt tctttatcta ctttgatgtc catgtcaaag |
| 66001 | gtggcagcca ggatcaggac accttgggcc actcaggaag gtaggtgaga gaggccctag |
| 66061 | gagcccctgt tcgtcagctg agtcccacct cctgatgtca gcccctgcac ccctgagctg |
| 66121 | ctgggtctgc ctgcctggtc tggccctctt cagaagagca gtgcccaccc ccacattgct |
| 66181 | gggctcccca ctggtggatg ctggcgtacc gtctccctct gtgcacaggg ttcccgtgcc |
| 66241 | cagggagcct cgggggctgg tcctgtgagg cctgctttac ggatgccaag actgaagctc |
| 66301 | agagggggcg aggggtttgt tcaggttcac tccaaggcgc agccagggtg aagaccgcct |
| 66361 | ctgaggtcca aagtcatgtt ctgttgtcct aagccaggag acacatagag ggcaggaaca |
| 66421 | gaagccaggg gacagacacc cctgtcgcca catgaagctc ttggccctcg ctcctccatc |
| 66481 | aaatcgtccc caggtgtggc tgctggagag gcggggaggt ggcctttgcg tgggggagac |
| 66541 | agtccctcat ctggtcctct gtgccttagt ttcttccctg gctcttcttc cccttccctt |
| 66601 | tttaatgacc ttaaacattt ttttaattat ataaaagaaa tgtttacatt ttcaaaaata |
| 66661 | atttaaacaa attgaaaggc tggaaatcaa caccctcaca ctccttctgc tgccagctgc |
| 66721 | caccccaggg tcctgtcggt ggctgctgcc gcctgcctat cagtttctgg tggcagctgt |
| 66781 | aacctgtaac cacagctacc taaataatgc acatgtatta cctcacgctt ctgtaggcga |
| 66841 | gaagtctaac gcgagtcttg ccgcgctgca gccaaggcgt gggcaggact gtgttcctct |
| 66901 | gcaggcaccc gttgtatccc ttgcctgctc cagcttctgg tggccgtccg cgtcccttgg |
| 66961 | ctctcggccc cttccttcat cttcaaagcc tgcagagggg aagtcgagtc cttctcctgc |
| 67021 | cacgtcactc tgaccatccc ttcctggtca cacctccctt gaactcttcg cttctgcccc |
| 67081 | cttcgtccac ttttaaggac ccttgtgatt acactgggct tgagggataa tctgggataa |
| 67141 | tctcccgatt ttaaggtcag ctgattagca accttgattc cctctgcagc ctgaattcct |
| 67201 | ctttgccatg taacatgatg tagtcacaga tcctgggagt aagatgtgga caactttgag |
| 67261 | gggctatcat tctgccccct acaatatcct ccctaccttt tctgtgtttt ctgtgttttc |
| 67321 | cattcactgg gacggacagg tctgcacgtt tgttcccgtg agtgagatca taccacgtgt |
| 67381 | atgtcagaag ccaactttca ccacctcatt ttgggatctt tttccacagc atccacacaa |
| 67441 | aaactctgtc tagcagctgc ctgtgtccca ttgtcaagct cgatcccatc atttattcaa |
| 67501 | gagttcccct gatagggatt tagattgttt ccagttttca tctgttacca acctggctgt |
| 67561 | agggaatacc cttgttccaa aagtctctgt acacatacga ctttctgtgg gatcatttct |
| 67621 | gggagtgaac ctactaggtc aaccagtggg gtcgcaaaat gtgatgatgc caccggacca |
| 67681 | cccccaacac acaccgttgt ggcggacact cccagcagtg ggtattatta gtctgagata |
| 67741 | cttgcccatc ttgtctacta agcattattt tgtattacat catcagtttc agctcattta |
| 67801 | ctgagcacct gccacatgtc aggccctggc ctagaccctg gggactgcgc cagtcagatg |
| 67861 | ttctcagtct tcagggaatt tatggtttgg cagaggtaga accttttgag gcaggggaga |
| 67921 | ggctgcccag agacagagct aggagagaca tttaaactgg gctgcaggtc agtaaattac |
| 67981 | ccagggaggt aaagttgcca aaaaaacatt ccaggccggg cacagtggct catgcctgta |
| 68041 | atcccagcat tttgggaggc caaggccggc agatcacaag gtcagaagtt caagaccatc |
| 68101 | ctggctaaca cagtgaaacc ccatctctac taaaaataca aaaattagct gggcgtggtg |
| 68161 | gtgggcacct gtagtcccag ctactcacga ggctgaggca gaagaatcac ttgaacccag |
| 68221 | aggtggaggt tgcagtgagc tgagattgct ccactgcact ccagcctggg tgacagaaca |
| 68281 | aaactctgtc tcaaaaacaa aaacaaaaac aaaaaaacca caaaattcca ggcagtggga |
| 68341 | atagctaaag ctcagaggtg tgaacgtgct gcaaccgtaa ctgtgagatt gcttggcaga |
| 68401 | gaaaggccag ggatgagaac gtaaaggtca gccatgggaa cggggacttg actctgtagg |
| 68461 | acgaggaatc cctggagggc ttgaggcagg agcgacaagg tgaggtttgt gaatgaggag |
| 68521 | ccgtggggtg ggggtgggag caggagcagg tgcagactgg aggtgctggg acccaggagg |
| 68581 | aggtggtgta cctgcccctg agccttctcc tctggaggct ggggaagggc cgctgtccag |
| 68641 | aggaacgggg cagcctgtga caccctggcg tccggcccac aggaggcatg tgagcgcagc |
| 68701 | ctggcagaga tggagtcctc gcaccagcag gtgatggagg agctgcagcg gcaccacgag |
| 68761 | cgggagctgc agcgcctgca gcaggagaag gagtggctcc tggctgagga gacggcagcc |
| 68821 | acggcctcag gtatggaccc tggggggggc acagtgggct gggctctgag cctctgtgct |
| 68881 | gaggttcctc ctagccaaac tggggaggat tttatcaaat aagatgtagg ggtctcagtg |
| 68941 | ccacatttgg ggtaaagggt cagcaggtgt tagaagctcc aagaactggc ctgtagccct |
| 69001 | acttaaaaag ggaaactgag gcagtaaaag ataccctccc cacccccaac accaccacta |
| 69061 | ccataggtgg tgactcttcc tgctcagggg cctgcagcca ccatagagtc tgcctaaagg |
| 69121 | cacatgctac ccacgtgcgt gggggagagg ctgatcagct gcatcccctg tcctcatagg |
| 69181 | agtgcctcct ccctgggcac atgggccaga ccctggggag agcaggggaa ggtgtgagca |
| 69241 | ttgtccatgc cagctgtgtg ccaggcactg ggccccacat gtttcccaca ggagcaccct |
| 69301 | tcatcctgga caattccctc ccctcctgcc accgcacacc tgctgtgtgc ctggcacatt |
| 69361 | cctaggcatc actaggggtt tgcagaacaa tagaaatgct ggccaatgtc acatgatctg |
| 69421 | aagctcacaa cctgccagtg ctgtgccaag tgctcatgca ctcgaaccca gccttggggc |
| 69481 | cagtgtgctc tgcatttcag gaagatcgcc tttgcagccg cgtgtgttag agaccccttc |
| 69541 | cccctcagca gagtctggac ttcgccctgt aatctggcac taaggtttct gctgtgaaat |
| 69601 | ggataaaaat cacacttaag tggaataata aagaccataa atagcctcat gtccgttcag |
| 69661 | ggtggggatt gccaccaaaa gatttaccag aggcccggtg cagtggctca tgcctgtaat |
| 69721 | cccagcactt tgggaggctg aggcgggcag atcacctgag gtcaggagtt cgagactagc |
| 69781 | ctggccaaca tggtgaaacc ccatctctac taaaaataca aaaattagct gggcgtgatg |
| 69841 | gtgggcagct gcaatcccag ctactcagga ggctaaggca ggagaatctc ttgaacccag |
| 69901 | gagacagagg ctgcagtgag ctgagattgc accactgcac tccagcctgg atgacagagt |
| 69961 | aagactccat caaaaaaaaa aaaggccagg cactgtggct catgcctgta atcccagcac |
| 70021 | tttgggaggc cgaggcaggt gcatcacgag gtcaggagtt caagaccagc ctggccaaga |
| 70081 | tggtgaaacc ctgtctctac tatgaataca aaaattagcc atgcgcggtg gcaggcgcgt |
| 70141 | gtaatcccag ctactcagga ggctgaggca ggagaatcgc ttgaaagtgg gcggcaaagg |
| 70201 | ttgtagtgaa ccaagattgt gccactgcac tccagcctgg gtgacagagt gagactccgt |
| 70261 | ctcctgggtg acagagtgag actccgtctc ctgggtgaca gagtgagact ctgtctcaaa |
| 70321 | aaaaaaaaga aagaaaaaaa ggagagaaac tttcaatgtt cagaagtttc ggattttaga |
| 70381 | attgtgggta aaaccatggg tggccctgag tgggaaaaaa aaagcctcgg tctcagtcct |
| 70441 | taggagctca caatctgaga ataaagccag caggagctaa tgttggggca tttactctga |
| 70501 | gccatgcttt gttctaaatt cttcacacac cttccaataa ccccatggag gaaaggtact |
| 70561 | gttgttatcg atccctgttt tccagataag ggatctgagg cacaaggggt taagtcacct |
| 70621 | gtgcaaagtc acatcggttt atgctgactg tggagcctga gctcttgacc acgaggctgg |
| 70681 | tcaaagcaga taggccttgt ttgagagccc tcagagtctg cagggggggt gtactaggtg |
| 70741 | gggtcctacc tggaaatcac tagaacagga ggtaccaatg gtcagaccct gagctgtctc |
| 70801 | cccagtaggg tccatccaac aggattatct tcccttaata gatgggctga gagaggttga |
| 70861 | gagcttaccc caagccactc agtttatgac acaacctggg ctactctaga ctcctggttc |
| 70921 | ggtgctcttt gcatagcact ccttggtcca agtccatagt acttgcatag tactatgtgg |
| 70981 | agtccacata gtactccacc agtacatgtg gcgtctcaga gctggtggca cttggtgctg |
| 71041 | ctgacccccc tccagtctct cttgtgcctc tctgccctgc ttccagccat tgaagccatg |
| 71101 | aagaaggcct accaggaaga gctgagccga gagctgagca aaacacggag tctccagcag |
| 71161 | ggcccggatg gcctccggaa gcagcaccag taagatgatg ccggggccca actgcccacc |
| 71221 | ctgatggtta tgggttgagg aactttgctg aggccccttg gcagcggaca catcagtttg |
| 71281 | cccctagctg agattcctgc tccagtctca tggatgcaag aaacagaagc agaaggtcct |
| 71341 | caggcagacc ccatgccagt cctcacagac agtccttcag gcagcttctt gtcttggctg |
| 71401 | gtcccagcct ccacccacct cttcacccct ttagtctccc ctggagctgg gctgcagtgt |
| 71461 | cactgttgac cactaggcct ctccctgccc cagagcacag ttttggaatg ttgaggtttc |
| 71521 | aggggcttta actttaaaga tgggcccctc cagccgggca cattggctca tgcctgtaat |
| 71581 | cccagcactt tgggaggctg ggatcaggag ttcgagacta gcctggccaa catggtgaaa |
| 71641 | ccccatctct actaaaaata caagctagct gaatgtggtg gcgggagcct gcaattctag |
| 71701 | ctacttggga ggctgaggca ggagaatcgc ttgaacccag gaggcagagg ttgcagtgag |
| 71761 | ccaagattgt gccattgtat tccagcctgg gcaacaagag tgagagcaag actccatcta |
| 71821 | aaaaaaaaaa aaaagatggg ctcctccaag ccaccctcac ttagggtaaa cacctgtagc |
| 71881 | ccagagaagc tgtcactggt tcacagcccc acagcaggct aaaggcaaac ctagagaggg |
| 71941 | aaccccagag tcctgggatg ctttaagtct acctgactgg actccaggct tggcaggagc |
| 72001 | aagacaacct atgctctcct ctgctcctcc tctggggcag gtcagatgtg gaggcactga |
| 72061 | agcgagagct gcaggtgcta tcggagcagt actcgcagaa gtgcctggag attggggcac |
| 72121 | tcatgcggca ggctgaggag cgcgagcaca cgctgcgccg ctgccagcag gagggccagg |
| 72181 | agctgctgcg ccacaaccag gtgggcctgg ccccaggttg gggggacacg ggtgggtccc |
| 72241 | ggcacccctc ccctgaccac cgtgcctctc ccaggagctg catggccgcc tgtcagagga |
| 72301 | gatagaccag ctgcgcggct tcattgcctc gcagggcatg ggcaatggct gcgggcgcag |
| 72361 | caacgagcgg agttcctgcg agctagaggt gagtgtcctc actagcacca ggcagcccag |
| 72421 | tggttctcgg ggcccggggc tatggggcac ccccgccata ggctgggtat cacctgtggc |
| 72481 | aggaaagcca agtctcccag tggctgggcc agcctgacta ggctagaaca cctactgtgc |
| 72541 | atccagtagc cagcattctg ccctcccacc tgcattgtgt cacctacctg ccgtgtacca |
| 72601 | tagcaaatca ctccactttt ctgagtccca gtagctcatc tgtaaaatgg caccagcacc |
| 72661 | ttccttactg ggaaatattg gggtaagaaa atatgtgtgt atgtgtgtga tgccagtatc |
| 72721 | actgtagtat tttctttctt tttctttctt tctttttttg agacagagtc tctctctgtc |
| 72781 | acccaggctg gagtgtagtg acacgatctc agttcactgc aacctctgcc tccctggttc |
| 72841 | aagcgattct cctgcctcag cctcccaagt agctaggatt acaggcctgc accaccacac |
| 72901 | ccagctaatt ttttatattt ttggtagaga caagtttcac tatgttggcc aggctggtct |
| 72961 | cgaactccgg acctcaagtg atctgcctac cttggcctca caaagtgctg ggattacagc |
| 73021 | atgagccacc acacccggcc ttagtattta tttctttact tttttttttt ttttgagaca |
| 73081 | gagttttgct gttgttgccc aggctacagt gcagtggcgc gatctcggct caccacaacc |
| 73141 | tccgcctccc aggttaaaac gattctcctg gccgggcgcg gtggctcacg cctgtaatcc |
| 73201 | cagcactttg ggaggccgag gcgggcagat cacgaggtag gagatcaaga ccatcctggc |
| 73261 | taacacagtg aaaccccgtc tctactaaaa atacaaaaaa attacccggg cgtggtggcg |
| 73321 | ggcgcggtgg cgggtgcctg tagtcccagc cactccggag gctgaggcag gagaatggca |
| 73381 | tgaacctggg aggcggagcg tgcagtgagc cgagatcgtg ccactgcact ccagcctggg |
| 73441 | tgacagagcg agactccgtc tcaaaaaaaa aaaaaatatt aaaaaaaaaa agcgattatc |
| 73501 | ctgcctcagc ctcccaagta gctaggatta caggcatgtg ccacctcgcc tggataattt |
| 73561 | tgtattttta gtagagacag ggtttttcca tgttggtcag gctcttctcg aactcccaac |
| 73621 | ctcaggtgat ccgcccactt cggcctctca aagtgttggg attacaggcg tgagccaccg |
| 73681 | tgcccagccg atattttatt tctctttttt tttttgagac ggagtcactc tgtcacccag |
| 73741 | gctggagtgc agtggcacca tctcggctca ctgcaagctc cgcctctcgg gttcatgcca |
| 73801 | ttctcctgcc tcagcctccc gagtagctgg gactacaggc acccgccacc acacctggct |
| 73861 | aattttttgt atttttagta gagacggggt ttcaccatgt tagccgggat ggtcccaatc |
| 73921 | tcctgacctc gtgatccgcc cgcctctgcc tcccaaagtg ctgggattac aggcgtgagc |
| 73981 | caccgctcct ggccccaata ttttatttct tcaacaaaca cttaggtgag gctcactctg |
| 74041 | tacctagaaa ttctggaagc cctttttgtc tgttaactca tctaatcttc ctgacagctc |
| 74101 | catacattag ctactatgac tgtccccatt tacagatgag gaaactgagg cacaggaagg |
| 74161 | tcaagtacct taccaaagct tttatagctg gactgggatt tgaaccaggc agtctggctc |
| 74221 | cagtctgagc ttttaagcct ccccagtcct ggctgaactt gtttcctcct tggtcaagtc |
| 74281 | agcagcacct agccctcggg gttggggagg ggttaatgag gtgccttgtg gagtggttca |
| 74341 | gcctgctcag gtttatgtag ggcttctttt catccatctc actcccgagg tgagagcctg |
| 74401 | gtgctgcatg agggctgcag cagacttgac cgtgagatat ccactcacac gggctggaca |
| 74461 | ggggtgagag taagggaagg caaagcaggg gaatcggaga gggcttcctg gaggagtccg |
| 74521 | cctccaggat gtagagggtt tttgtgcaga taggggctgc attctagggg cctgaggcag |
| 74581 | agagaacccg ggctgcaggg cactatgggc cagggtagct ctggcttctg gccctgggtc |
| 74641 | agtccagcac ctatatcccc aggtgctgct tcgcgtaaaa gaaaacgaac tccagtacct |
| 74701 | aaagaaggag gtgcagtgcc tccgggacga gctccagatg atgcagaagg taggtccttc |
| 74761 | cgctgggctg ggggccgtcg gggactctgg agccatctgg atgccatcct gtgagcacct |
| 74821 | gctctgtgcc aagccctcca ctcgcttcat ccttcctcag gctctcctgt gcttctccca |
| 74881 | tgtaggtgtc atcatcccca ttcactgaca gggaaactga gactaagaaa ggggaagtga |
| 74941 | cttccccaag gctgtacttg gcttctgttt atttagcatt atttaattta ttgattatta |
| 75001 | ttgagcacct actatatcct gggcactgtg ctaggtgctg ggaagacaga tgtgaacaaa |
| 75061 | ataaccccaa atctctgctg tggggagctt gcactccagt gagaataacc acgttgctag |
| 75121 | gagttgggtg ggtcagggtt cagcccaggt ctgagtctgc agcccgcctg gcccaccctt |
| 75181 | ggctgctatg tcactgcctg gtgcgctctg tcagtttggg gcaggaagtg gacatgttgg |
| 75241 | tggctctgta agtgcacgtg agccagaccg tgtttaccgc acttgaagaa caggtggcgt |
| 75301 | gaactcacag gaagggcccg agcacccagc caggctgacc tggttctcat cccagccact |
| 75361 | cactgccctg cggtcttggt caaaatcttc tcccccgaaa caggatgagg atgacaatga |
| 75421 | cgcctgtgtc cctgggtggt accagggagg tgggaggggt aagcccagaa cccacggcca |
| 75481 | tcttggggag ccacctggag ggatgaagcg aggtatctgc ggggaggtct ggctgctggt |
| 75541 | gctgcccatg tgcccggttg gcagggctgg agggagagac ttcatgccct catacctgcc |
| 75601 | tcctgccccc caggacaagc gcttcacctc gggaaagtac caggacgtct atgtggagct |
| 75661 | gagccacatc aagacacggt ctgagcggga gatcgagcag ctgaaggagc acctgcgtct |
| 75721 | tgccatggcc gccctccagg agaaggagtc gatgcgcaac agcctggctg agtagaggtg |
| 75781 | gatgccgagg cgtgtgccct gcagggtggg caggggctga ggctctccca cacccgggac |
| 75841 | tccctggacc accccagcca ggccacttcc ttcttctggc ctccaattcc cgttctgtaa |
| 75901 | aaaggacaat gaaaccagca acacggggtt gttgcagaga tcccatcaga cccgggccac |
| 75961 | aggctgcttc atcagcttaa gcctgttcct ccagagctgg gcggcacagt gcagagccac |
| 76021 | agcctactca gtgcaccccc cttcttgggg ctggaggcaa atgcagcgtg cacatccctg |
| 76081 | acccccacag tgaatctcca ctgagcttca cacacacaca tcgcacgctg aggccgggct |
| 76141 | tctatcccag ttagtcttaa cactccttct tgacttagca gggctcaaag tggttggttg |
| 76201 | gttggttggt tggttggttg gttggttggt tggttggttt tggttgcttt gagaaaggtc |
| 76261 | ttactctgac acccaggctg gagtgcagtg gtgcaatcac ggctcactgc agcctcaacc |
| 76321 | tcctaggctc aagggatcct cccacctcag ccttctgagt agctgggacc acaggccctc |
| 76381 | accaccatgc ccagataatt tttgcacttt ttgtataggt ggggtttcgc cgtgatttcc |
| 76441 | caggctggtc tcgaactcct gggctcaagc aatacacctg cctcagcctc ccaaaattct |
| 76501 | gagattacag gtgtgagccg ctgcacctgg ccaaagtgtt cttatttttg ctttttcaac |
| 76561 | gccacatcta cctggagcat cctctttctg ataagtcctc atggacttcc tatggcatgc |
| 76621 | aggagaggcc accctatggc tgagctgctt gggaaggagc caggaagagc ggatctggct |
| 76681 | gtaccttagg ggctgagagg tggtggaagg acccactcag cacccttgct tggccttggg |
| 76741 | gtggcctcgc agcccctcag cccaggcctc agccctgccg caccttgtct ttcaggtccc |
| 76801 | gcccagctgc agaccctcca ggctggagga ccagccgccc tccttccctc ctggatggaa |
| 76861 | gtaaaaagcc aagctttctc cccaccctct gtgggccaca cgtgcacttg cacccaccac |
| 76921 | acacacacac acacacacac acacacacac agacacacag acacatacgc acacacgtgc |
| 76981 | acacatgtac acacggatac acacacacac acacacactg catatctgag cgcgcccctc |
| 77041 | gcactgggtc tcaccttgca ccttcttcag gattttatat gtgaagagat ttttatatag |
| 77101 | atttttttcc tttttttcca aaacacttta tactttaaaa aaaaaaaaaa aaagcaattc |
| 77161 | ctggtggctg tgtgcctcca accctggtcc ccctctgtct ccagccaccc tctgcttggg |
| 77221 | cttctgagct ggtggccctg gcccagaggt ctggcggagg cccaggcagc agccatggcg |
| 77281 | gggtgtctct acaggggaga ggcgggagcc tgccaccctc ttcctgccct acctcctact |
| 77341 | aacacttcct gccccatttg gacccgtacc atggggctca ggacagaggg agctagcagc |
| 77401 | tggcctccat ggccccacag cctccttcga ggctgtgctg ggtgcagaac cgccagagcc |
| 77461 | acccaaaagg tgtttctctt ctgctccctg aacctcttaa cttaataaaa cgttccagca |
| 77521 | gctctggtgt cctagatggc tggcagaaca ggaatggaga ttggggtttc ttgaagtggc |
| 77581 | ttccccactc acaccctacc cacaccccac ccttcctaaa gcagcggcct ctaggcttct |
| 77641 | gagggtgggg ctgaaaatcc aaggtctccc ttagtacaga ctgtgacgcc cccagtgtgg |
| 77701 | cttgcaggct agtggcagcg gaagcatgtg ggaaatagca agtccagtcc caccccaacc |
| 77761 | tactgaacca gcgtctgcat tttaacaggg tgccccagtg attcacgtga ccttcaaagt |
| 77821 | ctgaggagcc ctggagtagg gcccagggcc caggcctgag agagaggcct ggggctaaga |
| 77881 | ctagccctga ccatgacctt gggcaagtca cacccctcac tgagcctcag tttgcttctc |
| 77941 | catcaaatgg gtgtttttct ttcagtccca gtcctctcct gaggcttttc ccagaggtca |
| 78001 | tgcccagccc tgggcagggg tgagggcagg gttgtggctg ccaggcacag gtccagcggg |
| 78061 | ctgggagtcc tcaccatggc tggctgtgct gattatggtt gcatggggct gggaagaggt |
| 78121 | cccatttctg agccacagaa acaggccaca tccagtaggg gtcctggaag gctgtgagaa |
| 78181 | cccagaggag accctgaccc agcctgcagg tagaagactg cctttggagg cagctttgaa |
| 78241 | agatgactct tccagatgga agaatcagga agggccttcc cacgtggagg caccagcagg |
| 78301 | agcaaacgtc cctggtgtgt tcaggcaaag agccacagga gagtgacctc gtggagtggg |
| 78361 | aagagattgt ttcccattcc cttgccaggg attggttgag gaatggacaa ggcttgcagt |
| 78421 | tcacgcaagc cagtgaaatg cgaggggaag tcttgggagt ggggtggagg aggtcatctg |
| 78481 | ggaagggtgt ccttggtctt aaaaagaggc acaagaggcc gggcgcggtg gctcttgcct |
| 78541 | attatcctag cactttggga ggccaaggca gggggatcac ttgaggtcag gagttcgaga |
| 78601 | ccagcctggc caacatggtg aaaccccgtc tctactaaaa atacaaaaaa ttagccagac |
| 78661 | gtggtgccaa gcacctgtaa tcccagctac tcaggaggct gaggcaggag aatcacttga |
| 78721 | acccaggagg cagaagttgc agtgagccaa gatcgcgcca ctgcactcca gcctgtgtga |
| 78781 | caagggcgaa actccatctc aaaaaaaaag ggggagggtg gcgcaaggag aggacacctc |
| 78841 | tctcctggcc ctgtcgccat cttccctcat caatagctaa aaatggcaaa gaagaaagag |
| 78901 | ccaggacccc gtgccatcaa atcctccggc cttgtgctgc cctgtctcgg cactgcttgc |
| 78961 | cttaggagat caggagtgtt cctagccact gggagatggg atgcctgcca ctggcagctc |
| 79021 | tgccgtccat cctcaccatc ccaccgtccc cccaagacag ctctccatcc catcctctgc |
| 79081 | ctcccttcta gcctcaacct aactcagggc tcccccgtct cacacctggg ttgcaggaac |
| 79141 | atcctcttca ccaacccccc tcccatccct cctcagggct gcctagggca gctacaaaaa |
| 79201 | ccaggccagc ctctgaaagg tgctccacat ctcattaaaa accgtgaaat cgcactgccc |
| 79261 | cactatcaga atagctcaga ggagaaggtc tgccagtacc aagtgctggt ggggatacgg |
| 79321 | agaagagcag ctcccaggcg ctgctggtgc aaatgtgctt tgttgcaccc acggcaggaa |
| 79381 | actgaccagc ttctcatcaa gttaaatacg catctaccct atggcctagc atttccactc |
| 79441 | ttgcttacac atccaggaga aatgagtcct tacatgcaca aaaggatgag taccgtaata |
| 79501 | ctcacatcag caaataaaca atacagctgt gtgtcagtag tagaatgaat aaattgtggt |
| 79561 | cgattcata |

### Stereocilin

[0150] The STRC gene encodes stereocilin, a protein that is normally expressed in the inner ear and is associated with the stereocilia of specialized hair cells in the inner ear (see, e.g., Verpy et al., Nature 456: 255-258, 2008; and Zhang et al., J. Med. Genet. 44: 233-240, 2007). Stereocilia, which are about 10-50 μm in length, are important for hearing and balance. Stereocilia play a mechanosensing role in hearing. By bending in response to sound, they form a structure for mechanoreception of sound stimulation.

[0151] The human STRC gene is located on chromosome 15915. It contains 29 exons encompassing ˜19 kilobases (kb) (Verpy et al., Nature Genetics 29(3): 345-349, 2001; NCBI Accession No. NG011636.1). The gene is tandemly duplicated on chromosome 15915 in a telomere-to-centromere orientation, with the tandem copies located less than 100 kb apart on the chromosome. The coding sequence of the second copy is interrupted by a stop codon in exon 20, meaning that it is a “pseudogene” that encodes a nonfunctional truncated protein. (Hereinafter, references to “the STRC gene” mean the gene that does not have that stop codon in exon 20, while references to the “pseudogene” or the “STRC pseudogene” denote the gene that does have that stop codon in exon 20.) In some examples, the full-length STRC protein is a full-length wildtype STRC protein. The full-length wildtype STRC protein expressed from the human STRC gene is 1775 residues in length, and contains a signal peptide and several hydrophobic segments. When the signal peptide is cleaved off during processing of the wildtype protein, the resulting mature wildtype stereocilin protein is 1719 residues in length. In some embodiments, a full-length STRC protein can include a heterologous signal peptide positioned N-terminal to an amino acid sequence of a mature wildtype stereocilin protein.

[0152] Various mutations in the STRC gene have been associated with hearing loss (e.g., non-symptomatic sensorineural hearing loss). For example, a homozygous 1-bp insertion was identified in exon 13 in a consanguineous Pakistani family with autosomal recessive non-syndromic sensorineural deafness-16 (DFNB16) (Verpy et al. (2001). Another example found in a family with DFNB16 includes both a 4-bp deletion in exon 5 and a larger deletion encompassing exons 17-29. The two deletions were inherited from the father and mother, respectively. The 4-bp deletion was predicted to result in the translation of 5 out-of-frame amino acids and a premature stop codon in exon 5.

[0153] Additional exemplary mutations in a stereocilin gene detected in subjects having non-symptomatic sensorineural hearing loss and methods of sequencing a nucleic acid encoding stereocilin are described in, e.g., Verpy et al., Nature 456:255-259, 2008; Verpy et al., Res. Systems Neurosci. 519:194-210, 2011; Hofrichter et al., Clinical Genetics 87:49-55, 2015; and Mandelker et al., J. Mol. Diagnostics 16:639-647, 2014. Methods of detecting mutations in a gene are well-known in the art. Non-limiting examples of such techniques include: real-time polymerase chain reaction (RT-PCR), PCR, sequencing, Southern blotting, and Northern blotting.

[0154] An exemplary human wildtype stereocilin protein is or includes the sequence of SEQ ID NO: 34. Non-limiting examples of nucleic acid encoding a wildtype stereocilin protein are or include SEQ ID NO: 35 and SEQ ID NO: 36. As can be appreciated in the art, at least some or all of the codons in SEQ ID NO: 35 can be codon-optimized to allow for optimal expression in a non-human mammal or in a human.

[0155] In some embodiments of any of the compositions described herein, the STRC protein comprises a sequence that is at least 75% (e.g., at least 80%, at least 85%, at least 90%, at least 91%, at least 92%, at least 93%, at least 94%, at least 95%, at least 96%, at least 97%, at least 98%, at least 99%) identical to SEQ ID NO: 34.

Human Full-length Wildtype Stereocilin Protein
(Signal sequence shown in bold)
(SEQ ID NO: 34)
MALSLWPLLLLLLLLLLLSFAVTLAPTGPHSLDPGLSELKSLLSTLDQAPQGSLSRSRETTFLANISSSFE
PGRMGEGPVGEPPPLQPPALRLHDFLVTLRGSPDWEPMLGLLGDMLALLGQEQTPRDFLVHQAGVLGGLVE
VLLGALVPGGPPTPTRPPCTRDGPSDCVLAADWLPSLLLLLEGTRWQALVQVQPSVDPTNATGLDGREAAP
HFLQGLLGLLTPTGELGSKEALWGGLLRTVGAPLYAAFQEGLLRVTHSLQDEVFSILGQPEPDTNGQCQGV
FFLTLSLLGNLQQLLLWGVRHNLSWDVQALGFLSGSPPPPPALLHCLSTGVPLPRASQPSAHISPRQRRAI
TVEALCENHLGPAPPYSISNFSIHLLCQHTKPATPQPHPSTTAICQTAVWYAVSWAPGAQGWLQACHDQFP
DEFLDAICSNLSFSALSGSNRRLVKRLCAGLLPPPTSCPEGLPPVPLTPDIFWGCFLENETLWAERLCGEA
SLQAVPPSNQAWVQHVCQGPTPDVTASPPCHIGPCGERCPDGGSFLVMVCANDTMYEVLVPFWPWLAGQCR
ISRGGNDTCFLEGLLGPLLPSLPPLGPSPLCLTPGPFLLGMLSQLPRCQSSVPALAHPTRLHYLLRLLTFL
LGPGAGGAEAQGMLGRALLLSSLPDNCSFWDAFRPEGRRSVLRTIGEYLEQDEEQPTPSGFEPTVNPSSGI
SKMELLACFSPVLWDLLQREKSVWALQILVQAYLHMPPENLQQLVLSAEREAAQGFLTLMLQGKLQGKLQV
PPSEEQALGRLTALLLQRYPRLTSQLFIDLSPLIPFLAVSDLMRFPPSLLANDSVQQGYRGSEENSLEEDK
GLRPMTPRSLAAIRDYSPGMRPEQKEALAKRLLAPELFGEVPAWPQELLWAVLPLLPHLPLENFLQLSPHQ
IQALEDSWPAAGLGPGHARHVLRSLVNQSVQDGEEQVRRLGPLACFLSPEELQSLVPLSDPTGPVERGLLE
CAANGTLSPEGRVAYELLGVLRSSGGAVLSPRELRVWAPLFSQLGLRFLQELSEPQLRAMLPVLQGTSVTP
AQAVLLLGRLLPRHDLSLEELCSLHLLLPGLSPQTLQAIPRRVLVGACSCLAPELSRLSACQTAALLQTFR
VKDGVKNMGTTGAGPAVCIPGQQPIPTTWPDCLLPLLPLKLLQLDSLALLANRRRYWELPWSEQQAQFLWK
KMQVPTNLTLRNLQALGTLAGGMSCEFLQQINSMVDFLEVVHMIYQLPTRVRGSLRACIWAELQRRMAMPE
PEWTTVGPELNGLDSKLLLDLPIQLMDRLSNESIMLVVELVQRAPEQLLALTPLHQAALAERALQNLAPKE
TPVSGEVLETLGPLVGFLGTESTRQIPLQILLSHLSQLQGFCLGETFATELGWLLLQESVLGKPELWSQDE
VEQAGRLVFTLSTEATSLIPREALGPETLERLLEKQQSWEQSRVGQLCREPQLAAKKAALVAGVVRPAAED
LPEPVPNCADVRGTFPAAWSATQIAEMELSDFEDCLTLFAGDPGLGPEELRAAMGKAKQLWGPPRGFRPEQ
ILQLGRLLIGLGDRELQELILVDWGVLSTLGQIDGWSTTQLRIVVSSFLRQSGRHVSHLDFVHLTALGYTL
CGLRPEELQHISSWEFSQAALFLGTLHLQCSEEQLEVLAHLLVLPGGFGPISNWGPEIFTEIGTIAAGIPD
LALSALLRGQIQGVTPLATSVIPPPKFAVVFSPIQLSSLTSAQAVAVTPEQMAFLSPEQRRAVAWAQHEGK
ESPEQQGRSTAWGLQDWSRPSWSLVLTISFLGHLL
Human Wildtype Stereocilin cDNA
(SEQ ID NO: 35)
atggctctcagcctctggccoctgctgctgctgctgctgctgctgctgctgctgtcctttgcagtgactct
ggcccctactgggcctcattccctggaccctggtctctccttcctgaagtcattgctctccactctggacc
aggctccccagggctccctgagccgctcacggttctttacattcctggccaacatttcttcttcctttgag
cctgggagaatgggggaaggaccagtaggagagcccccacctctccagccgcctgctctgcggctccatga
ttttctagtgacactgagaggtagccccgactgggagccaatgctagggctgctaggggatatgctggcac
tgctgggacaggagcagactccccgagatttcctggtgcaccaggcaggggtgctgggtggacttgtggag
gtgctgctgggagccttagttcctgggggcccccctaccccaactcggcccccatgcacccgtgatgggcc
gtctgactgtgtcctggctgctgactggttgccttctctgctgctgttgttagagggcacacgctggcaag
ctctggtgcaggtgcagcccagtgtggaccccaccaatgccacaggcctcgatgggagggaggcagctcct
cactttttgcagggtctgttgggtttgcttaccccaacaggggagctaggctccaaggaggctctttgggg
cggtctgctacgcacagtgggggcccccctctatgctgcctttcaggaggggctgctccgtgtcactcact
ccctgcaggatgaggtcttctccattttggggcagccagagcctgataccaatgggcagtgccagggagtt
ttcttccttactctttccctcctaggtaaccttcaacagctgctcttatggggcgtccggcacaacctttc
ctgggatgtccaggcgctgggctttctgtctggatcaccacccccaccccctgccctccttcactgcctga
gcacgggcgtgcctctgcccagagcttctcagccgtcagcccacatcagcccacgccaacggcgagccatc
actgtggaggccctctgtgagaaccacttaggcccagcaccaccctacagcatttccaacttctccatcca
cttgctctgccagcacaccaagcctgccactccacagccccatcccagcaccactgccatctgccagacag
ctgtgtggtatgcagtgtcctgggcaccaggtgcccaaggctggctacaggcctgccacgaccagtttcct
gatgagtttttggatgcgatctgcagtaacctctccttttcagccctgtctggctccaaccgccgcctggt
gaagcggctctgtgctggcctgctcccaccccctaccagctgccctgaaggcctgccccctgttcccctca
ccccagacatcttttggggctgcttcttggagaatgagactctgtgggctgagcgactgtgtggggaggca
agtctacaggctgtgccccccagcaaccaggcttgggtccagcatgtgtgccagggccccaccccagatgt
cactgcctccccaccatgccacattggaccctgtggggaacgctgcccggatgggggcagcttcctggtga
tggtctgtgccaatgacaccatgtatgaggtcctggtgcccttctggccttggctagcaggccaatgcagg
ataagtcgtgggggcaatgacacttgcttcctagaagggctgctgggcccccttctgccctctctgccacc
actgggaccatccccactctgtctgacccctggccccttcctccttggcatgctatcccagttgccacgct
gtcagtcctctgtcccagctcttgctcaccccacacgcctacactatctcctccgcctgctgaccttcctc
ttgggtccaggggctgggggcgctgaggcccaggggatgctgggtcgggccctactgctctccagtctccc
agacaactgctccttctgggatgcctttcgcccagagggccggcgcagtgtgctacggacgattggggaat
acctggaacaagatgaggagcagccaaccccatcaggctttgaacccactgtcaaccccagctctggtata
agcaagatggagctgctggcctgctttagtcctgtgctgtgggatctgctccagagggaaaagagtgtttg
ggccctgcagattctagtgcaggcgtacctgcatatgcccccagaaaacctccagcagctggtgctttcag
cagagagggaggctgcacagggcttcctgacactcatgctgcaggggaagctgcaggggaagctgcaggta
ccaccatccgaggagcaggccctgggtcgcctgacagccctgctgctccagcggtacccacgcctcacctc
ccagctcttcattgacctgtcaccactcatccctttcttggctgtctctgacctgatgcgcttcccaccat
ccctgttagccaacgacagtgtacagcagggctacagagggtcagaggaaaacagtttggaggaagacaaa
gggttaagacccatgactcctcgcagcctggctgccatccgggattacagcccaggaatgaggcctgaaca
gaaggaggctctggcaaagcgactgctggccoctgaactgtttggggaagtgcctgcctggccccaggagc
tgctgtgggcagtgctgcccctgctcccccacctccctctggagaactttttgcagctcagccctcaccag
atccaggccctggaggatagctggccagcagcaggtctggggccagggcatgcccgccatgtgctgcgcag
cctggtaaaccagagtgtccaggatggtgaggagcaggtacgcaggcttgggcccctcgcctgtttcctga
gccctgaggagctgcagagcctagtgcccctgagtgatccaacggggccagtagaacgggggctgctggaa
tgtgcagccaatgggaccctcagcccagaaggacgggtggcatatgaacttctgggtgtgttgcgctcatc
tggaggagcggtgctgagcccccgggagctgcgggtctgggcccctctcttctctcagctgggcctccgct
tccttcaggagctgtcagagccccagcttagagccatgcttcctgtcctgcagggaactagtgttacacct
gctcaggctgtcctgctgcttggacggctccttcctaggcacgatctatccctggaggaactctgctcctt
gcaccttctgctaccaggcctcagcccccagacactccaggccatccctaggcgagtcctggtcggggctt
gttcctgcctggcccctgaactgtcacgcctctcagcctgccagaccgcagcactgctgcagacctttcgg
gttaaagatggtgttaaaaatatgggtacaacaggtgctggtccagctgtgtgtatccctggtcagcagcc
tattcccaccacctggccagactgcctgcttcccctgctcccattaaagctgctacaactggattccttgg
ctcttctggcaaatcgaagacgctactgggagctgccctggtctgagcagcaggcacagtttctctggaag
aagatgcaagtacccaccaaccttaccctcaggaatctgcaggctctgggcaccctggcaggaggcatgtc
ctgtgagtttctgcagcagatcaactccatggtagacttccttgaagtggtgcacatgatctatcagctgc
ccactagagttcgagggagcctgagggcctgtatctgggcagagctacagcggaggatggcaatgccagaa
ccagaatggacaactgtagggccagaactgaacgggctggatagcaagctactcctggacttaccgatcca
gttgatggacagactatccaatgaatccattatgttggtggtggagctggtgcaaagagctccagagcagc
tgctggcactgacccccctccaccaggcagccctggcagagagggcactacaaaacctggctccaaaggag
actccagtctcaggggaagtgctggagaccttaggccctttggttggattcctggggacagagagcacacg
acagatccccctacagatcctgctgtcccatctcagtcagctgcaaggcttctgcctaggagagacatttg
ccacagagctgggatggctgctattgcaggagtctgttcttgggaaaccagagttgtggagccaggatgaa
gtagagcaagctggacgcctagtattcactctgtctactgaggcaatttccttgatccccagggaggcctt
gggtccagagaccctggagcggcttctagaaaagcagcagagctgggagcagagcagagttggacagctgt
gtagggagccacagcttgctgccaagaaagcagccctggtagcaggggtggtgcgaccagctgctgaggat
cttccagaacctgtgccaaattgtgcagatgtacgagggacattcccagcagcctggtctgcaacccagat
tgcagagatggagctctcagactttgaggactgcctgacattatttgcaggagacccaggacttgggcctg
aggaactgcgggcagccatgggcaaagcaaaacagttgtggggtcccccccggggatttcgtcctgagcag
atcctgcagcttggtaggctcttaataggtctaggagatcgggaactacaggagctgatcctagtggactg
gggagtgctgagcaccctggggcagatagatggctggagcaccactcagctccgcattgtggtctccagtt
tcctacggcagagtggtcggcatgtgagccacctggacttcgttcatctgacagcgctgggttatactctc
tgtggactgcggccagaggagctccagcacatcagcagttgggagttcagccaagcagctctcttcctcgg
caccctgcatctccagtgctctgaggaacaactggaggttctggcccacctacttgtactgcctggtgggt
ttggcccaatcagtaactgggggcctgagatcttcactgaaattggcaccatagcagctgggatcccagac
ctggctctttcagcactgctgcggggacagatccagggcgttactcctcttgccatttctgtcatccctcc
tcctaaatttgctgtggtgtttagtcccatccaactatctagtctcaccagtgctcaggctgtggctgtca
ctcctgagcaaatggcctttctgagtcctgagcagcgacgagcagttgcatgggcccaacatgagggaaag
gagagcccagaacagcaaggtcgaagtacagcctggggcctccaggactggtcacgaccttcctggtccct
ggtattgactatcagcttccttggccacctgctatga
Human Wildtype Stereocilin cDNA - Codon Optimized
(SEQ ID NO: 36)
atggctctgtctctgtggcctctgctgctgctcctgttgctgcttctgctgctcagcttcgccgtgacact
ggctccaacaggaccccactctctggatcctggcctgagctttctgaagtccctgctgagcaccctggatc
aggctcctcagggcagcctgagcagatccagattcttcaccttcctggccaacatcagcagcagcttcgag
cctggcagaatgggagaaggacctgtgggagaacctcctccactgcaacctccagctctgcggctgcacga
ttttctggtcacactgagaggcagccccgactgggaacctatgctgggactgctgggagatatgctggccc
tgctcggacaagagcagacccctagagatttcctggtgcatcaggctggcgtgctcggaggactggttgaa
gttctgcttggagcactggtgcctggcggacctcctacacctacaagacctccatgcaccagagatggccc
cagcgattgtgtgctggctgctgattggctgcctagcctgctcctgcttctggaaggcacaagatggcagg
ccctggtgcaggttcagccttctgtggatcctaccaatgccaccggcctggatggaagagaagccgctcca
cactttctgcagggactgcttggactgctcacacctactggcgagctgggctctaaagaagccctttgggg
aggcctgctgagaacagttggagcccctctgtacgccgcctttcaagagggactcctgagagtgacacaca
gcctgcaggacgaggtgttcagcatcctgggacagccagagcctgacaccaatggacagtgtcagggcgtg
ttctttctgaccctgagcctgctgggcaacctgcagcaactgcttctgtggggcgtcagacacaacctgag
ctgggatgtgcaggcactgggctttctgtctggaagccctccacctccaccagcactgctgcattgtctgt
ctactggcgtgccactgcctagagcctctcagcctagcgctcacatcagccccagacagagaagggccatc
accgtggaagctctgtgcgagaatcacctgggacctgctcctccatacagcatcagcaacttctccatcca
tctgctgtgtcagcacaccaagcctgccacacctcagcctcatcctagcaccacagccatctgtcagaccg
ccgtttggtacgccgtttcttgggctcctggtgctcaaggatggctgcaggcctgtcacgatcagttcccc
gacgagttcctggacgccatctgcagcaatctgagcttctctgccctgtccggcagcaatcggagactggt
caaaagactgtgcgccggactgctgcctcctccaacatcttgtcctgagggactgcctcctgtgcctctga
ctcccgatatcttttggggctgcttcctggaaaacgagacactgtgggccgagagactgtgtggcgaagcc
tctctgcaagccgtgcctccatctaatcaggcctgggtgcagcacgtttgtcagggccctacacctgacgt
gacagcctctcctccttgtcacatcggaccttgcggcgagagatgtcctgatggcggcagctttctcgtga
tggtctgcgccaacgacactatgtacgaggtgctggtgcccttctggccttggctggctggccagtgtaga
atctccagaggcggcaacgatacctgtttcctggaaggactcctgggaccactgcttccatctctgcctcc
gcttggaccctctcctctgtgtcttacccctggacctttcctgctggggatgctgtctcagctgcctagat
gccagtctagcgtgccagctctggcccatccaaccagactgcactatctgttgcggctgctgaccttcctc
cttggacctggcgctggcggagctgaagctcaaggcatgcttggcagagccctgctgctgtcatccctgcc
tgacaactgcagcttctgggacgccttcagacctgaaggacgcagaagcgtgctgaggaccatcggcgagt
acctggaacaggatgaggaacagcctacaccaagcggcttcgaacccaccgtgaatcctagcagcggcatc
tccaagatggaactgctggcctgcttcagccccgtgctgtgggatctgctgcagagggaaaaaagcgtgtg
ggccctgcagatcctggtccaggcctatctgcacatgcctccagagaacctgcaacagctggtgctgtctg
ccgagagagaagctgcccagggattcctgactctgatgctgcagggaaagctgcagggcaaactccaggtg
ccacctagcgaagaacaggcccttggcagactgacagcactcctgctccagagataccccagactgacctc
tcagctgtttatcgatctgagccctctgatcccattcctggccgtgtccgacctgatgagattccctccta
gtctgctggccaacgactccgtgcagcagggatacagaggcagcgaggaaaacagcctggaagaggacaaa
ggcctgcggcctatgacacctagatctctggccgccatccgggattacagccctggaatgaggcccgagca
gaaagaggccctggctaagagactgctggctcccgagctgtttggcgaagttccagcctggcctcaagaac
tgctgtgggctgttctgcccctgctgccacatctgcctctggaaaacttcctgcagctgagcccacaccag
attcaggccctcgaggattcttggcctgccgctggactcggacctggacatgctagacacgtgctgagaag
cctggtcaaccagagcgttcaggacggcgaggaacaagtgcggagacttggacccctggcctgttttctga
gccccgaggaactgcagagtctggtgcctctgtctgaccctacaggccctgttgaaaggggcctgctggaa
tgtgccgccaatggaacactgagccctgagggcagagtggcctatgaacttctgggagtgctgagatctag
cggcggagccgttctgtcccctagggaacttagagtgtgggcacccctgtttagccagctgggcctgagat
tcctgcaagagctgtctgagccacagctgagggctatgctgcctgtgctccagggcacatctgtgacacca
gctcaagccgtcctgctgttgggcagactgctccctagacacgatctgtccctggaagaactgtgcagcct
gcacttgctgctgcctggactgtctcctcagacactgcaggccattcctcggagagtgcttgtgggagcct
gtagctgtctggcccctgagctgtctagactgagcgcctgtcaaacagccgctctcctgcagaccttcaga
gtgaaggatggcgtgaagaacatgggcaccacaggcgctggacctgccgtgtgtattcctggacagcagcc
cattcctaccacctggccagattgtctgctcccactgctgcccctgaaactgctgcagctggattctctgg
ctctgctggctaaccggcggagatattgggaactgccttggagcgaacagcaggcacagttcctgtggaag
aagatgcaggtccccaccaatctgacactgcggaatctgcaggctctcggcacacttgctggcggaatgag
ctgcgagttcctccagcagatcaacagcatggtggactttctggaagtggtgcacatgatctaccagctgc
caaccagagtgcggggaagcctgagagcttgtatttgggctgaactgcagcggcggatggccatgcctgaa
cctgaatggacaacagtgggccccgagctgaacggcctggactctaaacttctgctggatctccccatcca
gctgatggacagactgagcaacgagagcatcatgctggtggtggaactggtgcagagagccccagaacagc
tgctggcactgacacctctgcatcaagctgctctggccgaacgggcccttcagaatctggctcccaaagaa
acccctgtgtccggggaagtgctggaaacactgggacctcttgtgggcttcctgggcaccgagtctaccag
acagattcctctccagatcctgctgtcccacctgagccagctccagggattttgtctgggcgagacattcg
ccaccgaactcggatggttgctgctccaagagagcgtgctgggaaagcccgaactgtggtcacaggacgaa
gtggaacaggccggcagactggtgtttaccctgtctaccgaggccatcagtctgatccccagagaagcact
gggccctgaaacactcgagaggctgctggaaaagcagcagtcttgggaacagagcagagtgggccagctgt
gtagagaacctcagctggccgctaaaaaggccgcactggttgctggcgttgtcagacctgctgccgaggat
ctgccagagccagtgcctaattgtgccgatgtgcggggcacatttcctgccgcttggagcgctacacagat
cgccgaaatggaactgagcgacttcgaggactgtctgactctgtttgccggcgatcctggactgggaccag
aagaactgagagccgccatgggcaaagccaagcaactttggggacctccaagaggcttcagacccgaacag
attctgcagctcggccgcctgcttatcggactgggcgatagagagctgcaagaactgatcctggtggactg
gggcgtgctgtctactctgggacaaatcgacggctggtccaccacacagctgcggattgtggtgtccagct
tcctgaggcagtctggcagacatgtgtctcacctggacttcgtgcacctgactgccctgggctacacactg
tgtggactgcggcctgaggaacttcagcacatcagctcttgggagttcagccaggcagccctgtttctggg
aaccctgcatctgcagtgctccgaagaacaactggaagtgctcgcccatctgctcgtgctgccaggcggat
ttggccccatctctaattggggacccgagatcttcaccgagatcggcaccattgccgctggcatccctgat
ctggccctgtctgcactgctgagaggacagatccagggcgtgacaccactggccattagcgtgatccctcc
accaaagttcgccgtggtgtttagccccattcagctgtccagcctgacatctgcccaagccgtggctgtga
cccctgaacagatggcatttctgtctcccgagcagcggagagctgttgcttgggctcaacacgagggcaaa
gagagtcctgagcaacagggaagaagcaccgcttggggactgcaggattggtccagaccttcttggtcact
ggtgctgaccatcagctttctgggccacctcctgtga

[0156] A non-limiting example of a human wildtype stereocilin genomic DNA sequence is SEQ ID NO: 37. The exons in SEQ ID NO: 37 are: nucleotide positions 1-142 (exon 1), nucleotide positions 445-1230 (exon 2), nucleotide positions 1319-1343 (exon 3), nucleotide positions 2111-3368 (exon 4), nucleotide positions 4325-4387 (exon 5), nucleotide positions 4489-4605 (exon 6), nucleotide positions 4748-4914 (exon 7), nucleotide positions 5570-5756 (exon 8), nucleotide positions 5895-6010 (exon 9), nucleotide positions 6292-6424 (exon 10), nucleotide positions 6777-6959 (exon 11), nucleotide positions 7264-7302 (exon 12), nucleotide positions 7486-7653 (exon 13), nucleotide positions 7817-7882 (exon 14), nucleotide positions 8364-8489 (exon 15), nucleotide positions 9467-9525 (exon 16), nucleotide positions 10598-10721 (exon 17), nucleotide positions 10826-10938 (exon 18), nucleotide positions 13402-13537 (exon 19), nucleotide positions 13955-14151 (exon 20), nucleotide positions 14350-14440 (exon 21), nucleotide positions 14649-14805 (exon 22), nucleotide positions 15390-15559 (exon 23), nucleotide positions 17250-17405 (exon 24), nucleotide positions 17787-17929 (exon 25), nucleotide positions 18119-18267 (exon 26), nucleotide positions 18509-18605 (exon 27), nucleotide positions 18694-18841 (exon 28), and nucleotide positions 19041-19238 (exon 29). The introns are located between each of these exons in SEQ ID NO: 37, i.e., at nucleotide positions 143-444 (intron 1), nucleotide positions 1231 to 1318 (intron 2), nucleotide positions 1344-2110 (intron 3), nucleotide positions 3369-4324 (intron 4), nucleotide positions 4388-4488 (intron 5), nucleotide positions 4606-4747 (intron 6), nucleotide positions 4915-5569 (intron 7), nucleotide positions 5757-5894 (intron 8), nucleotide positions 6011-6291 (intron 9), nucleotide positions 6425-6776 (intron 10), nucleotide position 6960-7263 (intron 11), nucleotide positions 7303-7485 (intron 12), nucleotide positions 7654-7816 (intron 13), nucleotide positions 7883-8363 (intron 14), nucleotide positions 8490-9466 (intron 15), nucleotide positions 9526-10597 (intron 16), nucleotide positions 10722-10825 (intron 17), nucleotide positions 10939-13401 (intron 18), nucleotide positions 13538-13954 (intron 19), nucleotide positions 14152-14349 (intron 20), nucleotide positions 14441-14648 (intron 21), nucleotide positions 14806-15389 (intron 22), nucleotide positions 15560-17249 (intron 23), nucleotide positions 17406-17786 (intron 24), nucleotide positions 17930-18118 (intron 25), nucleotide positions 18268-18508 (intron 26), nucleotide positions 18606-18693 (intron 27), and nucleotide positions 18842-19040 (intron 28).

| Human Wildtype Stereocilin Gene (NCBI Accession No. NG_011636.1) | |
|---|---|
| (SEQ ID NO: 37) | |
| 1 | gccctgccct cacctggcta tcccacacag gtgagaataa ccagaactca cctccggtac |
| 61 | cagtgttcac ttggaaacat ggctctcagc ctctggcccc tgctgctgct gctgctgctg |
| 121 | ctgctgctgc tgtcctttgc aggtaagaag aacagtgagc agaactgggg atgaggagga |
| 181 | gggtggctgg aaaaagactt taagaatatg gaggtgaacc tgttagatag aaggacaaag |
| 241 | gagagaggca gagacttgtg caaaagggaa aaatgagggt taagaaaagc aggccaagac |
| 301 | ttactgtagg ccagtgaaag gggttcagct caccatcccc tcacctcatc tttagatcca |
| 361 | ggtagggaac tgtgctcagg ggcagggttg agtttgggct ctgtgttcct ctccttcagt |
| 421 | gacctctggt ttctctcctt acagtgactc tggcccctac tgggcctcat tccctggacc |
| 481 | ctggtctctc cttcctgaag tcattgctct ccactctgga ccaggctccc cagggctccc |
| 541 | tgagccgctc acggttcttt acattcctgg ccaacatttc ttcttccttt gagcctggga |
| 601 | gaatggggga aggaccagta ggagagcccc cacctctcca gccgcctgct ctgcggctcc |
| 661 | atgattttct agtgacactg agaggtagcc ccgactggga gccaatgcta gggctgctag |
| 721 | gggatatgct ggcactgctg ggacaggagc agactccccg agatttcctg gtgcaccagg |
| 781 | caggggtgct gggtggactt gtggaggtgc tgctgggagc cttagttcct gggggccccc |
| 841 | ctaccccaac tcggccccca tgcacccgtg atgggccgtc tgactgtgtc ctggctgctg |
| 901 | actggttgcc ttctctgctg ctgttgttag agggcacacg ctggcaagct ctggtgcagg |
| 961 | tgcagcccag tgtggacccc accaatgcca caggcctcga tgggagggag gcagctcctc |
| 1021 | actttttgca gggtctgttg ggtttgctta ccccaacagg ggagctaggc tccaaggagg |
| 1081 | ctctttgggg cggtctgcta cgcacagtgg gggcccccct ctatgctgcc tttcaggagg |
| 1141 | ggctgctccg tgtcactcac tccctgcagg atgaggtctt ctccattttg gggcagccag |
| 1201 | agcctgatac caatgggcag tgccagggag gtgagtgtgg ccagggctgg gactgggatg |
| 1261 | tggcagggca aggaaagtga aattggggta gttttcttcc ttactctttc cctcctaggt |
| 1321 | aaccttcaac agctgctctt atggtaagta acaggagacc agttctgagg gattgggcct |
| 1381 | ggaaaatctg gaggtgaaga gctgaagacc tcagcctcta gagaggaaaa ctgatgggag |
| 1441 | gagtgtagtt tagtggtttt ggggtgtgac tgtctgggtt ggtgtcccag ctccacctct |
| 1501 | tcctagccat atgaccttga gcaggttaca tagtctttct atacctcagt ttccccattt |
| 1561 | ataaaatgag aatgataata ttagttacca cagagttgtt gcacccggtt aaatgagttg |
| 1621 | atactgtgta tgcaaacgac ttaaaaccgt gctggcacat agcgcttaat aatgttagct |
| 1681 | agtaaagatg ggatttggaa aataaggaca cagctggatt cctctacccc cttactactt |
| 1741 | cagtacaaca atgccagaca gtagttagac atattgagtt gctgagcaga tttcctaaca |
| 1801 | tgaggcccgc tgagggttgt gtttaagcta tctaaaagca tacgaagaaa ggagacagaa |
| 1861 | gggggccagg tggacagaaa gaattccaac tggggcttct cctaggtgat tttggacctt |
| 1921 | ggcagggcag ctttctcttt tttgccccgt tgcagcattt caaccagtaa cgcctaaact |
| 1981 | ctcagggacc tcgcttgtag aaaagcctat gcttgccatg ccccttgagg gctctgagtc |
| 2041 | agggtcagaa tcttcagctg gaggaaatgt gaactgacca gatcctgcct gctcctccct |
| 2101 | ctgcacccag gggcgtccgg cacaaccttt cctgggatgt ccaggcgctg ggctttctgt |
| 2161 | ctggatcacc acccccaccc cctgccctcc ttcactgcct gagcacgggc gtgcctctgc |
| 2221 | ccagagcttc tcagccgtca gcccacatca gcccacgcca acggcgagcc atcactgtgg |
| 2281 | aggccctctg tgagaaccac ttaggcccag caccacccta cagcatttcc aacttctcca |
| 2341 | tccacttgct ctgccagcac accaagcctg ccactccaca gccccatccc agcaccactg |
| 2401 | ccatctgcca gacagctgtg tggtatgcag tgtcctgggc accaggtgcc caaggctggc |
| 2461 | tacaggcctg ccacgaccag tttcctgatg agtttttgga tgcgatctgc agtaacctct |
| 2521 | ccttttcagc cctgtctggc tccaaccgcc gcctggtgaa gcggctctgt gctggcctgc |
| 2581 | tcccaccccc taccagctgc cctgaaggcc tgccccctgt tcccctcacc ccagacatct |
| 2641 | tttggggctg cttcttggag aatgagactc tgtgggctga gcgactgtgt ggggaggcaa |
| 2701 | gtctacaggc tgtgcccccc agcaaccagg cttgggtcca gcatgtgtgc cagggcccca |
| 2761 | ccccagatgt cactgcctcc ccaccatgcc acattggacc ctgtggggaa cgctgcccgg |
| 2821 | atgggggcag cttcctggtg atggtctgtg ccaatgacac catgtatgag gtcctggtgc |
| 2881 | ccttctggcc ttggctagca ggccaatgca ggataagtcg tgggggcaat gacacttgct |
| 2941 | tcctagaagg gctgctgggc ccccttctgc cctctctgcc accactggga ccatccccac |
| 3001 | tctgtctgac ccctggcccc ttcctccttg gcatgctatc ccagttgcca cgctgtcagt |
| 3061 | cctctgtccc agctcttgct caccccacac gcctacacta tctcctccgc ctgctgacct |
| 3121 | tcctcttggg tccaggggct gggggcgctg aggcccaggg gatgcbgggt cgggccctac |
| 3181 | tgctctccag tctcccagac aactgctcct tctgggatgc ctttcgccca gagggccggc |
| 3241 | gcagtgtgct acggacgatt ggggaatacc tggaacaaga tgaggagcag ccaaccccat |
| 3301 | caggctttga acccactgtc aaccccagct ctggtataag caagatggag ctgctggcct |
| 3361 | gctttagtgt gagtgctctg ccagagggaa agctcctaga acagtgagaa ggccctccag |
| 3421 | gggaattcct cgaatactca gaggcagtag tgtggggtag tagttgaagc acacagctct |
| 3481 | agagtcagac aggcttggat tcatatcttg gttctgtgac cagccttgaa tgagttattt |
| 3541 | aacttctctg agcaatattt ttctcgtctc atttataaac tagggatgat aatggtatat |
| 3601 | gagataatac atgcbgtggg cttagcacag tgcatgatac acaaacatgc aataaatatt |
| 3661 | accttgttat tcttttgggc tctttgactc tctcactttc tgcaccagaa agaaaaagga |
| 3721 | tcaagttaga ggactctaaa tttttcccct agagagtgag aattggaggc tggcagaata |
| 3781 | caggaagata aggtaggaat gagaaagatt cagggacact accaatcaga agactttggt |
| 3841 | tctaggttca actgtgccac aaattagtgt gatcttaggc aagcaatttc atttagtttt |
| 3901 | tctgggcttc agtttttagt ctgtagaatg gaggggtgag aatatgttaa acaccataat |
| 3961 | taattcactg agtgcctatt atatgcaagg cactttgcta ggttctgtag gatatataaa |
| 4021 | gatttcttac tccatgttgg ggccaccttt ttcaaaccct gggcccagta aaatggaatt |
| 4081 | agatagtctc atagtatttg gttcaggtct acaagtatta attgagccaa ctatggacct |
| 4141 | ggcatgggag agggtacaag agaaattaga gatatgatcc cggacctaaa agagcttaat |
| 4201 | atctgaagaa tcacacttga gatgatggac aagcatccca gcaagtggag ctggaatgcc |
| 4261 | tgggggagct gcaggagaga cagagaagac agctctgttg gcatattgtc tttcttccca |
| 4321 | ccagcctgtg ctgtgggatc tgctccagag ggaaaagagt gtttgggccc tgcagattct |
| 4381 | agtgcaggta acaggtggag ggcacatggg tgggcbgggt gacagccatg gctggaggtc |
| 4441 | cctgccccgt gaggtgaggc catacccacc atgacctcct attcgcaggc gtacctgcat |
| 4501 | atgcccccag aaaacctcca gcagcbggtg ctttcagcag agagggaggc tgcacagggc |
| 4561 | ttcctgacac tcatgctgca ggggaagctg caggggaagc tgcaggtgag cactgagaaa |
| 4621 | ggggagcaag ggcacctgga gcctagtgtt cagagggctt gctttagtgg gaggaggaac |
| 4681 | tccagagagg aaatggcagg gatactgagc atctccagag gcagaatcca ttcctgtgcc |
| 4741 | cctacaggta ccaccatccg aggagcaggc cctgggtcgc ctgacagccc tgctgctcca |
| 4801 | gcggtaccca cgcctcacct cccagctctt cattgacctg tcaccactca tccctttctt |
| 4861 | ggctgtctct gacctgatgc gcttcccacc atccctgtta gccaacgaca gtgtgtaagg |
| 4921 | ttcttgcact actcctcctg ctcctgtcac ggtcaggcca accgcatcca cctggagcag |
| 4981 | ccccttccgg agctcctctc tgtttttttc tttcatgcca gataggcaat gtgccaacat |
| 5041 | cgtagcaagg tttgagagag gcacatctca cgcctgagtg tgaaaaccca atcattatgc |
| 5101 | taatgaacta caaaaggatc agagagctcc tctctattaa aaccagggag aggatgggcg |
| 5161 | tggtggctca tgcctgtaat cccagcacgt tgggagcccg aggcaggtgg atcactaggt |
| 5221 | ccgcctagtg agttcgagac cagcctggcc aatatggtga aaccccgtct ctattaaact |
| 5281 | acaaaaatta gccaggcatg gtggtgggcg cttgtagtcc cagttactct ggaggctgag |
| 5341 | gcaggaggat agcttgaacc tgggaggcag aggttgcagt gaaccaagat cgtgccactg |
| 5401 | cactccagcc tgggtgacag agcgagactc cgtcttaaaa aaaacaaaaa acaaaacaaa |
| 5461 | acaaaaaaac agggagagtc tccttcctat ctagacagca gggctacaga gggtcagagg |
| 5521 | aaaacagttt ggaggaagac aaagggttaa gacccatgac tcctcgcagc ctggctgcca |
| 5581 | tccgggatta cagcccagga atgaggcctg aacagaagga ggctctggca aagcgactgc |
| 5641 | tggcccctga actgtttggg gaagtgcctg cctggcccca ggagctgctg tgggcagtgc |
| 5701 | tgcccctgct cccccacctc cctctggaga actttttgca gctcagccct caccaggtat |
| 5761 | gagaatcatc ttctttactt gactggccca tcttctgcta gtggggacaa agagtcaatg |
| 5821 | gcatgtctct cagtggcccc tccctgcaag aaccctatag tgaccccagt gcgagctaac |
| 5881 | cttccccatc tcagatccag gccctggagg atagctggcc agcagcaggt ctggggccag |
| 5941 | ggcatgcccg ccatgtgctg cgcagcctgg taaaccagag tgtccaggat ggtgaggagc |
| 6001 | aggtacgcag gtgagttgtt gtgggatcag taaccaaggc aagagtggaa gaggtagaga |
| 6061 | gaggaaggca cagcbgtcac gcbgggtcgg tgttctagga agaaaggggc aagagagtag |
| 6121 | gcagtggcct caggcagcat agagttccag gagagaggtc tatagatggt gcccctgtgt |
| 6181 | agtggtgtag tgtcagagtg cccagtgtat gtacccatac catctgctgc caggcctgcc |
| 6241 | ttagtgctag tcttggggac cacacaaagg tcagcttcat gccctcctca ggcttgggcc |
| 6301 | cctcgcctgt ttcctgagcc ctgaggagct gcagagccta gtgcccctga gtgatccaac |
| 6361 | ggggccagta gaacgggggc tgctggaatg tgcagccaat gggaccctca gcccagaagg |
| 6421 | acgggtgagc ccctcagcac aagcctacaa gactttaggc ttcccctggg tctgtgtgga |
| 6481 | tggctttccc attgtgtcaa cttgagcaca gtggtgccag cccccatccc acttttgcaa |
| 6541 | cctccattcc ttactccatg gccattctta cctgttacca cctcttcctg gcccttctct |
| 6601 | atctggtctg tagcacccca aacataccct ttgccatttt gaacctaatc tactccagtc |
| 6661 | caatccctag ttccaaaccc tagcccaggc cctgggaaat tcagatgtgg gattagagag |
| 6721 | gaagttcaag gttcatctgt cttttctctc cagtcctaaa ccttctttgg ttacaggtgg |
| 6781 | catatgaact tctgggtgtg ttgcgctcat ctggaggagc ggtgctgagc ccccgggagc |
| 6841 | tgcgggtctg ggcccctctc ttctctcagc tgggcctccg cttccttcag gagctgtcag |
| 6901 | agccccagct tagagccatg cttcctgtcc tgcagggaac tagtgttaca cctgctcagg |
| 6961 | tttgcctgtc tcactccctg gcatgtaccc tccatccccg cttgagcccc agtcaagaga |
| 7021 | atcccattca gggataaaag cagcccctcc tttccctggg tgaacagtag aggtaaactc |
| 7081 | tgtctgcagg aggacgcctt cattcccttt cctcagatca agaagggacc tgagtcactg |
| 7141 | aggatggtta ctagggatgg ttaagaggca gcgggaagtt ttggagggtt tgccttagga |
| 7201 | acccacttag gacctggctg ctgggtcctg agagcbgttg ttttcggtcc catcccaaca |
| 7261 | caggcbgtcc tgctgcttgg acggctcctt cctaggcacg atgtgagtag cagcaacttc |
| 7321 | tcagcctccc gccagaggtc tctatcctct tttaacctgg ctcctgcatc tgcccctcct |
| 7381 | ctctctccgc tcccctcata cttactgcct tgctgcattg tgattgttgt cttccccaac |
| 7441 | acccttccct tcttcttcag gcctcttgtc tctcttgctc tttagctatc cctggaggaa |
| 7501 | ctctgctcct tgcaccttct gctaccaggc ctcagccccc agacactcca ggccatccct |
| 7561 | aggcgagtcc tggtcggggc ttgttcctgc ctggcccctg aactgtcacg cctctcagcc |
| 7621 | tgccagaccg cagcactgct gcagaccttt cgggtatgag agtggcaagg aggatgagat |
| 7681 | aatcagggat accggctctt tctggttggg aggaaggcat cttccctgag gccagggaag |
| 7741 | gcctttcata cctccccact tacacacaca cacacacaca cacacacaca cacacacaca |
| 7801 | accaattctc atgcaggtta aagatggtgt taaaaatatg ggtacaacag gtgctggtcc |
| 7861 | agcbgtgtgt atccctggtc aggtaagtgt gagatctccc aactgagctc ctctccccat |
| 7921 | tctggggcag tttcatatgg ctggtgctac ctcccacact accctgcagt ggccctgaga |
| 7981 | gttctggtta gctctgtgcc cattagcagc cctccccagt gccagatgca ggacagcatg |
| 8041 | atccactcac attgtcctag actaatgtca aagctggaag ggcctgagaa atcttccagg |
| 8101 | ccacccaccc tgctttcaga tgaaaagacc aaggcbggga gaagctaagg gactttgttt |
| 8161 | gcctggtgcc taactagcag caacacttga ccacagcagc ctgcagtgtg aggctcttag |
| 8221 | gcgtttattg ctacagtggc aaatgccatt ccacttctgt cctagctttg gtccctttcc |
| 8281 | acccccatgg ttccttttct ctgagtgcta agtacagact ctctcaccta tcactacact |
| 8341 | gctataccca tcaccgccag cagcctattc ccaccacctg gccagactgc ctgcttcccc |
| 8401 | tgctcccatt aaagctgcta caactggatt ccttggctct tctggcaaat cgaagacgct |
| 8461 | actgggagct gccctggtct gagcagcagg taattctccc cacttaattt cagaacttcc |
| 8521 | tccctcaatg tagtctacct tctttaccta tcccttagcc ctatttggcc agcttatccc |
| 8581 | tactatcctt tatttgattg tttgagatac agtctcactc tgttgcccag gctgcagtgc |
| 8641 | agtggcatga tcagagttcg ctgtaacctc aaactcctga gctcaggcaa tctttctgcc |
| 8701 | tcagcctcct gaatagctag gacgacaggt ggttaccacc atgcctggct aatttttaaa |
| 8761 | tttttttttt gttttttgag atgaagtctt gctctgtcac ccaggcttga gtacagtggc |
| 8821 | acaagcttgg ctcactgcaa cctctgtctc ccgggttcaa gcgattctcc tgcctcagcc |
| 8881 | tcccgagtag ctgggactac aggcactccc cacaatgcct ggctaatttt ttttttgttt |
| 8941 | tagtagagac agggtttcac catattggcc aggctggtct cgaactgctg accttgtgat |
| 9001 | ctgcctgcct ctgcctctca aagtgctggg attacaggtg tgagccacca tgcccggcca |
| 9061 | atttttaaat tttttgtaga gacagacaat acaaaaatgt ggacactatg tggagacact |
| 9121 | atgttgaggt actatgctgt ccagattggt cttgaactcc tggcctcaag caatcctcct |
| 9181 | gccttggcct cccaaagtgc tgggattaca gacctgagcc actgcaccca gccccctagt |
| 9241 | atctcttata atgtgacttg cttttctttt tctttctcct tcccttttct ttcatttctt |
| 9301 | tctcactctc gagagaagag tgggcatctg ggagagtggg aggctggtgg gtcccacaga |
| 9361 | gtgaggaggc aggactgggt ccaaggcagt cctgcctctc cactctaggg ggtatccttg |
| 9421 | gacagtgtct cttctgggaa ggggctcgtc tttctttctc ttgtaggcac agtttctctg |
| 9481 | gaagaagatg caagtaccca ccaaccttac cctcaggaat ctgcagtgag taacttgtgt |
| 9541 | tgagcagtgc gctgaattcg accaacattt ttttgagtgc ttactatgtg ccaggcacca |
| 9601 | tgtgatatgg aatgggggat atagggatga atgatgcata gtccctgcct cgtggacgtt |
| 9661 | ctcctagcac ctccctttgc cctcctttcc ttccacagtg ccatgcctat cctgactaga |
| 9721 | gccaaaggac tcagaaaacc tggattcagg ttccagtcct gtcacctact tgtcctcttg |
| 9781 | ggcaagtcat ttaacgtccc tgtgtcagtt ttcccttctt taaatgagaa ttacaatggc |
| 9841 | accagcctca taggtagtta ctgtgaagat taaatgaggt aggtcatgta agatatttaa |
| 9901 | cacagtgttt ggtccattgt aaagtcccag tagtcatttg ctactgttag tttacttcag |
| 9961 | gatgacttca gaggcactgg ccaagcaaga ataaatagga ataagaaggt atcactttac |
| 10021 | ttacacccac attagaagaa caatgggctt cagaatcttt tttttttttt ttttttcgag |
| 10081 | acagtcttgc tctgttgccc aggctggagt gcagtggcgc gatttcggct cactgcaacc |
| 10141 | tctgcctccc aggttcaagc gattctcctg tctcagcctc tggagtagct gggattacag |
| 10201 | gaatgtgcca ccatacccag ctaatttttg tatttttagt agagatgggg tttcaccatt |
| 10261 | ttggccaggc tggtctcaaa ctcctgacct caggtgatcc acccgcctca gcctcccaag |
| 10321 | ggcttcagaa tctaagacat ggctctagtt tcagtttacc acatttctag cagaatgatg |
| 10381 | ttgggaatgt cacctgactt ccataaatcc ttattttctc ctctgataaa cagcagtgat |
| 10441 | gttatgggga gctgatgaga tatctatgta aaaacatttc tcaaaccata aattacggtg |
| 10501 | gatgaacatc tgtacttgtg ttgagagtac tgatatcaag gagcaaacag gctgttgtat |
| 10561 | gtgttgaatg agcctctccc cactcacaca cccacagggc tctgggcacc ctggcaggag |
| 10621 | gcatgtcctg tgagtttctg cagcagatca actccatggt agacttcctt gaagtggtgc |
| 10681 | acatgatcta tcagctgccc actagagttc gagggagcct ggtgagaggg ggtgcctgga |
| 10741 | ctttagtggg agcagggagg ctgggaccct aggtatagaa cccagctcct atgttctgct |
| 10801 | ctggcctcac actgcttccc tacagagggc ctgtatctgg gcagagctac agcggaggat |
| 10861 | ggcaatgcca gaaccagaat ggacaactgt agggccagaa ctgaacgggc tggatagcaa |
| 10921 | gctactcctg gacttaccgt aagtactgca gctagagata ttggcccctc agaaagctca |
| 10981 | atctggggtg aagatctgcc cttagggaat gccctggagg aggtagtttt tctgtctggt |
| 11041 | agttccctga cataatttat agcccaaagc agaggatttt attcaaagtt gctctatgta |
| 11101 | ttgactggtt cccagaatat gctccagcac agggcagctg agggtggcaa cactgtattg |
| 11161 | aagcctgcca agtaatctta caataaccta gtccacatta attgagattg agacagagca |
| 11221 | tctgaagtga gggaggcaat gctccaaatc tgccccagag gattgtagtt tgctcagggc |
| 11281 | actgtgttct tagtgcattc agaggagtag atcgagagaa aaatatatga aaaatgtgat |
| 11341 | aaataccttc aaatacctga ggggctatca agtagaaatt agattgtcat atttatgagt |
| 11401 | ggccccattg ggcaagacta agagtagtta acggagatca gatttttaca tagtataaga |
| 11461 | aaaactaagg tagtgagttc ctggtccttg gagcbgttcg agcctaagcc agatggcccc |
| 11521 | atggcaggaa tgttgtagag cacgttcata tacaggttgt gggaagaaaa ggctatagga |
| 11581 | acccaaggct cctccctacc catggagaaa tttattagta tgttactcat atgctgcttt |
| 11641 | tctcatttta cccctaccac caccccgttg ccatccgcac tgtaagtcag gataggaaaa |
| 11701 | tgcbggtgtt acagtcttcc tggggaatat ggagctgaag tggagtaaaa gcagttgact |
| 11761 | tcattcctac ttttttcttt tttttctttt tttttttttt tgagacagag ttttgctgtg |
| 11821 | tcaccaaggc tggagtgcag tgacgtgatc tcggctcact gcaacctcca tcttccaggt |
| 11881 | tcaagcaatt ctcctgcctc agtctcccga gtagcbggga ctgtaggtgt gcaccaccat |
| 11941 | gccaggctaa tttttgtatt tgttgtaggg acgagctttc accatgttgg ccaggctggt |
| 12001 | cttgaactcc tggcttcaag tgatctgccc acctcggctt cccaacattc ttatattttt |
| 12061 | ataggccttt ccacagattt cagctcttgt atgacttagc ccagttccag aactggtaat |
| 12121 | cctaggtagg gtacaggtta tcacctctga tttcgggtaa aagggattta tttatttatt |
| 12181 | tgtttattta tttatatttt tgagacagag tctcgctctg tcacccaggc tggagtgcaa |
| 12241 | tggtgccatc tcggctcact gcaacctctc cctctggggt tcaagcaatt ctcctgcctc |
| 12301 | agcctgctga gtagcbggga ttacaggcgc gtgccaccac acccggctaa tttttgcatt |
| 12361 | tttagtagag acggggtttc accatgttgc tcagggtggt ctcgaatttc tgaccctgtg |
| 12421 | atctgcctgc ctcggcctcc caaagtgctg ggattacagg catgagccac tgcgtccggc |
| 12481 | ctgtttttac ttttttttaa tgccattcag atctgtttaa atatgtgggt tctgtgagat |
| 12541 | aatttagaat cccaaggtta cagatgaggt gaaagatcct agaccatgca tcaaaaaact |
| 12601 | tgagtttctc atttgtgaaa gaaggataag agaaacacct attttgtctg ggtgcagtgg |
| 12661 | ctcatgccta taatcccagc atttggggag gccaaggtgg gtggatcacg gaggtcaggt |
| 12721 | gttcaagacc agactggcca acatggcaaa acaccatctc tactaaaaat acaaaagtta |
| 12781 | gcbgggcgtg gtggcacgtg cgtgtaattc cagctattcg ggaggctgag gcacgagaat |
| 12841 | tgcttgaacc tgggaggtgc gggttgcagt gaactgagat cgcagcacca ctgtgctcca |
| 12901 | gcctgagtga tggagtgagg ccaggtcttg ttgtaggatc aaatgagata acacctgaaa |
| 12961 | gaactttgta aattgtatag cacgtacaaa caagaaggga cctcttcaca agcagaggaa |
| 13021 | gggtggtcct gtggaaaaaa acgggaattg ggagtgagag acctcaacat ttgatctctg |
| 13081 | tgaacctcag ttttttaatc tataaaatgg ggaaatgtta atggtactta atatttggag |
| 13141 | cttttgagtc cattagatca ggtaggattg ttcgttattt ttttttttta ggaagactag |
| 13201 | aaatatgttg ctcccttttt ctcccccact caagcttgat ggtgggaatt ggccctggag |
| 13261 | ctgtttacta tcagttcctg tccagcttca ctaaatttgg tctggggtca catcttagct |
| 13321 | gcggactgtg gggttttgtg gtcccttctc gacttggccc agctccacct gaatcctgtt |
| 13381 | gttgtcaaat tgctgtaata ggatccagtt gatggacaga ctatccaatg aatccattat |
| 13441 | gttggtggtg gagctggtgc aaagagctcc agagcagctg ctggcactga cccccctcca |
| 13501 | ccaggcagcc ctggcagaga gggcactaca aaacctggta agagtccacc ctaccagact |
| 13561 | cagatttgct gccctgggca attcttgctc ctcagacaat gctctctgac tgtcccccaa |
| 13621 | ccctctactt cttgctttct tgctgccaaa cagattcctg tctacaaggc ctggcccctg |
| 13681 | ttttgcctct gggttctgtt ccttgataat atgcttcacg ttacttgtcc atacctcttg |
| 13741 | gagtccgaga aatctcttgg agtccacctc tcagtctttc tgcctgctcc tatctgggct |
| 13801 | cattgcttaa ggaagtgaac aaaggtagtg agcatcatag ggtgctgagc tgggagcagg |
| 13861 | agggagggaa ggttaggggg cttggtgtct tgatcaaggt gtctggtatt ctgagtcaga |
| 13921 | agtgcattgt ccaagttctg atgctcttct ccaggctcca aaggagactc cagtctcagg |
| 13981 | ggaagtgctg gagaccttag gccctttggt tggattcctg gggacagaga gcacacgaca |
| 14041 | gatcccccta cagatcctgc tgtcccatct cagtcagctg caaggcttct gcctaggaga |
| 14101 | gacatttgcc acagagctgg gatggctgct attgcaggag tctgttcttg ggtatggacc |
| 14161 | ttcgagaact tcagattcta actcattcta tacccagtcc ctcagccacc atcatcagtg |
| 14221 | gcagcctgtt ccatattctt aaggtcccct ggagccctgt gtccgaaatc ctagcatgtc |
| 14281 | ctcttttccc cttccttttc ctcacagttc cctcagctcc ccagcccccg attttcttcc |
| 14341 | tgtccccagg aaaccagagt tgtggagcca ggatgaagta gagcaagctg gacgcctagt |
| 14401 | attcactctg tctactgagg caatttcctt gatccccagg gtgagatgaa ggaagaaggg |
| 14461 | aagggagtaa atgcatagag gggactggtg agctggttat ggggacccgt ggccaaagag |
| 14521 | ggcaaaggat atgaagccta gatctggggg gagactgcaa aacagagaca ggactttgga |
| 14581 | cttagagcta tagcagcagg tcctgatctg tccagatctc cccactctcc ttctaccttc |
| 14641 | tcatgcagga ggccttgggt ccagagaccc tggagcggct tctagaaaag cagcagagct |
| 14701 | gggagcagag cagagttgga cagctgtgta gggagccaca gcttgctgcc aagaaagcag |
| 14761 | ccctggtagc aggggtggtg cgaccagctg ctgaggatct tccaggtgaa actacccaaa |
| 14821 | tacttatatg tccagcagga tgtacaggga gtatcaaacg gtctgggttc tacatgtgct |
| 14881 | cttccctggg actgggtttt ctaatttata aagcaaagag tttagaggga tgatcttcaa |
| 14941 | gcctcttgta gttctagaat tctgtagttc tgggagtttg taaactatta agttttcttt |
| 15001 | tagcccagaa cttccatttt cctgctctct cgtgtctgct ctagactcag ctctagctcg |
| 15061 | gctaagtgtg gagctctctg ctggggagat ccctagaagc tttgaaggag acattgtgag |
| 15121 | gctggagaac tgggttcaaa ttcagtgcta ccattaaatc tctgaataac atcctcagtc |
| 15181 | ttccatctat aaaagtcttg gcatctccaa tcacttcttg ttctattatc tcctaagccc |
| 15241 | tatacatatt actctgtaat actcctttga tccctatttc tcacagtgct ctatcctcca |
| 15301 | aaggttggaa gactcactct atctacagat atctctctgg gcatatttta ttactgcgct |
| 15361 | gacctcctgg ccctgccttc ccccttcaga acctgtgcca aattgtgcag atgtacgagg |
| 15421 | gacattccca gcagcctggt ctgcaaccca gattgcagag atggagctct cagactttga |
| 15481 | ggactgcctg acattatttg caggagaccc aggacttggg cctgaggaac tgcgggcagc |
| 15541 | catgggcaaa gcaaaacagg ttagggatgg agagccaact ggggttggcc atgaggaagc |
| 15601 | tatttgggtg tgatgtagga cacaaagaga atggagagtt ggatgagagg tgggggaagc |
| 15661 | aagagataga agagttagaa gatttgggtc acaagtagga ggtgaaggga gataaatatt |
| 15721 | gaggaaagag agctagtata atgaatagag ggacgaaagc agtggttacc aaattttaat |
| 15781 | gcatatcacg atcatcaagg gaacagattt ttttctttat ttttttttct ttcttaaaaa |
| 15841 | aataatggca tgcttcggct gggtgcagcg gctcacgcct ataatctcag aactttggga |
| 15901 | ggccaaggcg ggcagatcac gaggtcagga gatcaagacc atcctgtcta acacggcgaa |
| 15961 | acacggtctc tactaaaaat acaaaaaagt tagccgggca tggtggtgca cacttgttgt |
| 16021 | cccagctact tgggaggctg aggcaggaga atggcgtgaa cctgggaggg ggagcttgca |
| 16081 | gtgagccgaa gtcaagccaa tgcactccat cctgggtgac agagcaagac tccatctcaa |
| 16141 | aaaaaaaaaa aaaaaaaaaa ggcatgcttc atgaatttgc gtgttatcct tgcacaggcg |
| 16201 | ccatgcaaat ctctgtatca ttccaatttt ttggggtatg tgctgctgaa ctgagcatgg |
| 16261 | gaacagtgcc agtgccagat taccatgctt cactgactta ataaaaacct ttggggaggc |
| 16321 | tgggcgcagt gactcatgcc tgtaatcaca gcactttggg aggcggaggc aggtggattg |
| 16381 | cttgagccca ggagttagag accagactgg gcaacatggt gaaaccctgt ctctactaaa |
| 16441 | aatagaaaaa acattagctg ggtgtggcgg cacatgcctg taatcccagc tactcaggag |
| 16501 | gcbggggtag gagaatccca tgagtgcagg aggtggaggg tgcaatgtgc caagatcgca |
| 16561 | ccactgccct ccagcctggg tgtcagagca agaccctgtc tcataaatta aaaaataagc |
| 16621 | ctctggggga aagagtctag acatctgcat ctcctttttt tttttttttt tttttttttg |
| 16681 | agacagagtc tcactctgtc acccagcatc caggctggag tgcagtggtg tgatcttggc |
| 16741 | tcactgtaac ctctacatcc tgggttcaaa cgatcctcct gcctcagcct ctcaagtagc |
| 16801 | tgggactaca ggtgcaccac acctggctaa tttttgtatc tttggtagag atggggtttc |
| 16861 | actatgttgc ccaggatggt ctcgaacttc tgggctcaag caatcctccc acctcagcct |
| 16921 | cccaaagtgc tgggattaca gcbgttagcc actgtgctgg gccctaggca tctgttttaa |
| 16981 | taagcgtctc tgtgtctgat gcacataaaa gtgtggaact catggactag agttagtttg |
| 17041 | ctcttctttt ccactgattg taatgtcttt caaaacacct tagaggaact gtaaggcaac |
| 17101 | ggtctcattt tatagtggag gaaactaaag aaaaggcaaa tgatttacct agagttatac |
| 17161 | agctaagggc agaggcaaga cttaaaaccc agcagtatga ctcccaatcc actgcttttc |
| 17221 | cactcacatt gttcctgtct ttctcctagt tgtggggtcc cccccgggga tttcgtcctg |
| 17281 | agcagatcct gcagcttggt aggctcttaa taggtctagg agatcgggaa ctacaggagc |
| 17341 | tgatcctagt ggactgggga gtgctgagca ccctggggca gatagatggc tggagcacca |
| 17401 | ctcaggtaac acttttcctc ctccctacgg cttcccaaac acccatccca cagacccagc |
| 17461 | cctatagatc atctaaagcc caaggaattt ttttcctgtg accctacctg gtccttcttt |
| 17521 | ctatcttttg ttgatacccc atactagtga ccttcaggac tctgatttat tcactctgag |
| 17581 | gccctggaca cataatactg tctcctacct cttttcctgg aggcttcctc tttttctttc |
| 17641 | cttttctttt ctgagtcctc agccttcccc atgactcctt aggtcttaat agtaacagaa |
| 17701 | tataacccag taacacctat cacttccctg tccattaatt ctccataact ttcctccttc |
| 17761 | ccctcttctc ccacccccca ccccagctcc gcattgtggt ctccagtttc ctacggcaga |
| 17821 | gtggtcggca tgtgagccac ctggacttcg ttcatctgac agcgctgggt tatactctct |
| 17881 | gtggactgcg gccagaggag ctccagcaca tcagcagttg ggagttcagg tcatttgtga |
| 17941 | aggggctgag ggtggtggtg ctgaggtaaa ggtggactta ctggggaaag aaggatcatg |
| 18001 | aaggtctggt cccatggagg aagggaactc atttgaagcc atctcttcct ttgtctcatg |
| 18061 | accacagccc ctttcactga agccgaattc ttcttccttc cttcctactg ttctacagcc |
| 18121 | aagcagctct cttcctcggc accctgcatc tccagtgctc tgaggaacaa ctggaggttc |
| 18181 | tggcccacct acttgtactg cctggtgggt ttggcccaat cagtaactgg gggcctgaga |
| 18241 | tcttcactga aattggcacc atagcaggtg gggagctggg ccactgctgg tgcaagttgg |
| 18301 | tttggtttct ataccatggg tggactggat ggaagactgc cctgcaattc ttaaggtggg |
| 18361 | ggcctgaggg tgtttaaata aggggctaga gacatattgg ggaaggtcta tgatagggca |
| 18421 | ctttgggagt agttagagaa ggtctatagg tttgaagaga gggaaggtca gtctaagaca |
| 18481 | atgtttggat gccacttgct tcaacagctg ggatcccaga cctggctctt tcagcactgc |
| 18541 | tgcggggaca gatccagggc gttactcctc ttgccatttc tgtcatccct cctcctaaat |
| 18601 | ttgctgtaag tattaatgga ctggggtgac cacaggagag ccagggccca atggggacta |
| 18661 | catgcatgca ctgattccta cccctgccct caggtggtgt ttagtcccat ccaactatct |
| 18721 | agtctcacca gtgctcaggc tgtggctgtc actcctgagc aaatggcctt tctgagtcct |
| 18781 | gagcagcgac gagcagttgc atgggcccaa catgagggaa aggagagccc agaacagcaa |
| 18841 | ggtgagttcc cagctgcaca gcttgatcct ccatctcctg acccagaatc aaacccctaa |
| 18901 | tttggtgctg tctggctctt agagtgcacc cagggagatc cctggagtga aggagtctac |
| 18961 | aggcagagcg ctaatttcca agtatcaatg ctcctggaga gctgagttgt gatattactc |
| 19021 | ccattccctg tctattatag gtcgaagtac agcctggggc ctccaggact ggtcacgacc |
| 19081 | ttcctggtcc ctggtattga ctatcagctt ccttggccac ctgctatgag cctgtctcta |
| 19141 | cagtagaagg agattgbggg gagagaaatc ttaagtcata atgaataaag tgcaaacaga |
| 19201 | agtgcatcct gattattttc agaagctgat gaggaata |

The nucleotide sequence of the human STRC pseudogene is shown in SEQ ID NO: 38.

| Human Stereocilin Pseudogene 1 (STRCP1) | |
|---|---|
| (SEQ ID NO: 38) | |
| 1 | gccctgccct cacctggcta tcccacacag gtgagaataa ccagaactca cctccggtac |
| 61 | cagtgttcac ttggaaacat ggctctcagc ctctggcccc tgctgctgct gctgctgctg |
| 121 | ctgctgctgc tgtcctttgc aggtaagaag aacagtgagc agaactgggg atgaggagga |
| 181 | gggtggctgg aaaaagactt taagaatatg gaggtgaacc tgttagatag aaggacaaag |
| 241 | gagagaggca gagacttgtg caaaagggaa aaatgagggt taagaaaagc aggccaagac |
| 301 | ttactgtagg ccagtgaaag gggttcagct caccatcccc tcacctcatc tttagatcca |
| 361 | ggtagggaac tgtgctcagg ggcagggttg agtttgggct ctgtgttcct ctccttcagt |
| 421 | gacctctggt ttctctcctt acagtgactc tggcccctac tgggcctcat tccctggacc |
| 481 | ctggtctctc cttcctgaag tcattgctct ccactctgga ccaggctccc cagggctccc |
| 541 | tgagccgctc acggttcttt acattcctgg ccaacatttc ttcttccttt gagcctggga |
| 601 | gaatggggga aggaccagta ggagagcccc cacctctcca gccgcctgct ctgcggctcc |
| 661 | atgattttct agtgacactg agaggtagcc ccgactggga gccaatgcta gggctgctag |
| 721 | gggatatgct ggcactgctg ggacaggagc agactccccg agatttcctg gtgcaccagg |
| 781 | caggggtgct gggtggactt gtggaggtgc tgctgggagc cttagttcct gggggccccc |
| 841 | ctaccccaac tcagccccca tgcacccgtg atgggccgtc tgactgtgtc ctggctgctg |
| 901 | actggttgcc ttctctgctg ctgttgttag agggcacacg ctggcaagct ctggtgcagg |
| 961 | tgcagcccag tgtggacccc accaatgcca caggcctcga tgggagggag gcagctcctc |
| 1021 | actttttgca gggtctgttg ggtttgctta ccccaacagg ggagctaggc tccaaggagg |
| 1081 | ctctttgggg cggtctgcta cgcacagtgg gggcccccct ctatgctgcc tttcaggagg |
| 1141 | ggctgctccg tgtcactcac tccctgcagg atgaggtctt ctccattttg gggcagccag |
| 1201 | agcctgatac caatgggcag tgccagggag gtgagtgtgg ccagggctgg gactgggatg |
| 1261 | tggcagggca aggaaagtga aattggggta gttttcttcc ttactctttc cctcctaggt |
| 1321 | aaccttcaac agctgctctt atggtaagta acaggagacc agttctgagg gattgggcct |
| 1381 | ggaaaatctg gaggtgaaga gctgaagacc tcagcctcta gagaggaaaa ctgatgggag |
| 1441 | gagtgtagtt tagtggtttt ggggtgtgac tgtctgggtt ggtgtcccag ctccacctct |
| 1501 | tcctagccat atgaccttga gcaggttaca tagtctttct atacctcagt ttccccattt |
| 1561 | ataaaatgag aatgataata ttagttacca cagagttgtt gcacccggtt aaatgagttg |
| 1621 | atactgtgta tgcaaacgac ttaaaaccgt gctggcacat agcgcttaat aatgttagct |
| 1681 | agtaaagatg ggatttggaa aataaggaca cagctggatt cctctacccc cttactactt |
| 1741 | cagtacaaca atgccagaca gtagttagac atattgagtt gctgagcaga tttcctaaca |
| 1801 | tgaggcccgc tgagggttgt gtttaagcta tctaaaagca tatgaagaaa ggagacagaa |
| 1861 | gggggccagg tggacagaaa gaattccaac tggggcttct cctaggtgat tttggacctt |
| 1921 | ggcagggcag ctttctcttt tttgccccgt tgcagcattt caaccagtaa cgcctaaact |
| 1981 | ctcagggacc tcgcttgtag aaaagcctat gcttgccatg ccccttgagg gctctgagtc |
| 2041 | agggtcagaa tcttcagctg gaggaaatgt gaactgacca gatcctgcct gctcctccct |
| 2101 | ctgcacccag gggcgtccgg cacaaccttt cctgggatgt ccaggcgctg ggctttctgt |
| 2161 | ctggatcacc acccccaccc cctgccctcc ttcactgcct gagcacgggc gtgcctctgc |
| 2221 | ccagagcttc tcagccgtca gcccacatca gcccacgcca acggcgagcc atcactgtgg |
| 2281 | aggccctctg tgagaaccac ttaggcccag caccacccta cagcatttcc aacttctcca |
| 2341 | tccacttgct ctgccagcac accaagcctg ccactccaca gccccatccc agcaccactg |
| 2401 | ccatctgcca gacagctgtg tggtatgcag tgtcctgggc accaggtgcc caaggctggc |
| 2461 | tacaggcctg ccacgaccag tttcctgatg agtttttgga tgcgatctgc agtaacctct |
| 2521 | ccttttcagc cctgtctggc tccaaccgcc gcctggtgaa gcggctctgt gctggcctgc |
| 2581 | tcccaccccc taccagctgc cctgaaggcc tgccccctgt tcccctcacc ccagacatct |
| 2641 | tttggggctg cttcttggag aatgagactc tgtgggctga gcgactgtgt ggggaggcaa |
| 2701 | gtctacaggc tgtgcccccc agcaaccagg cttgggtcca gcatgtgtgc cagggcccca |
| 2761 | ccccagatgt cactgcctcc ccaccatgcc acattggacc ctgtggggaa cgctgcccgg |
| 2821 | atgggggcag cttcctggtg atggtctgtg ccaatgacac catgtatgag gtcctggtgc |
| 2881 | ccttctggcc ttggctagca ggccaatgca ggataagtcg tgggggcaat gacacttgct |
| 2941 | tcctagaagg gctgctgggc ccccttctgc cctctctgcc accactggga ccatccccac |
| 3001 | tctgtctgac ccctggcccc ttcctccttg gcatgctatc ccagttgcca cgctgtcagt |
| 3061 | cctctgtccc agctcttgct caccccacac gcctacacta tctcctccgc ctgctgacct |
| 3121 | tcctcttggg tccaggggct gggggcgctg aggcccaggg gatgcbgggt cgggccctac |
| 3181 | tgctctccag tctcccagac aactgctcct tctgggatgc ctttcgccca gagggccggc |
| 3241 | gcagtgtgct acggacgatt ggggaatacc tggaacaaga tgaggagcag ccaaccccat |
| 3301 | caggctttga acccactgtc aaccccagct ctggtataag caagatggag ctgctggcct |
| 3361 | gctttagtgt gagtgctctg ccagagggaa agctcctaga acagtgagaa ggccctccag |
| 3421 | gggaattcct cgaatactca gaggcagtag tgtggggtag tagttgaagc acacagctct |
| 3481 | agagtcagac aggcttggat tcatatcttg gttctgtgac cagccttgaa tgagttattt |
| 3541 | aacttctctg agcaatattt ttctcgtctc atttataaac tagggatgat aatggtatat |
| 3601 | gagataatac atgcbgtggg cttagcacag tgcatgatac acaaacatgc aataaatatt |
| 3661 | accttgttat tcttttgggc tctttgactc tctcactttc tgcaccagaa agaaaaagga |
| 3721 | tcaagttaga ggactctaaa tttttcccct agagagtgag aattggaggc tggcagaata |
| 3781 | caggaagata aggtaggaat gagaaagatt cagggacact accaatcaga agactttggt |
| 3841 | tctaggttca actgtgccac aaattagtgt gatcttaggc aagcaatttc atttagtttt |
| 3901 | tctgggcttc agtttttagt ctgtagaatg gaggggtgag aatatgttaa acaccataat |
| 3961 | taattcactg agtgcctatt atatgcaagg cactttgcta ggttctgtag gatatataaa |
| 4021 | gatttcttac tccatgttgg ggccaccttt ttcaaaccct gggcccagta aaatggaatt |
| 4081 | agatagtctc atagtatttg gttcaggtct acaagtatta attgagccaa ctatggacct |
| 4141 | ggcatgggag agggtacaag agaaattaga gatatgatcc cggacctaaa agagcttaat |
| 4201 | atctgaagaa tcacacttga gatgatggac aagcatccca gcaagtggag ttggaatgcc |
| 4261 | tgggggagct gcaggagaga cagagaagac agctctgttg gcatattgtc tttcttccca |
| 4321 | ccagcctgtg ctgtgggatc tgctccagag ggaaaagagt gtttgggccc tgcagattct |
| 4381 | agtgcaggta acaggtggag ggcacatggg tgggcbgggt gacagccatg gctggaggtc |
| 4441 | cctgccccgt gaggtgaggc catacccacc atgacctcct attcgcaggc gtacctgcat |
| 4501 | atgcccccag aaaacctcca gcagcbggtg ctttcagcag agagggaggc tgcacagggc |
| 4561 | ttcctgacac tcatgctgca ggggaagctg caggggaagc tgcaggtgag cactgagaaa |
| 4621 | ggggagcaag ggcacctgga gcctagtgtt cagagggctt gctttagtgg gaggaggaac |
| 4681 | tccagagagg aaatggcagg gatactgagc atctccagag gcagaatcca ttcctgtgcc |
| 4741 | cctacaggta ccaccatccg aggagcaggc cctgggtcgc ctgacagccc tgctgctcca |
| 4801 | gcggtaccca cgcctcacct cccagctctt cattgacctg tcaccactca tccctttctt |
| 4861 | ggctgtctct gacctgatgc gcttcccacc atccctgtta gccaacgaca gtgtgtaagg |
| 4921 | ttcttgcact actcctcctg ctcctgtcac ggtcaggcca accgcatcca cctggagcag |
| 4981 | ccccttccgg agctcctctc tgtttttttc tttcatgcca gataggcaat gtgccaacat |
| 5041 | cgtagcaagg tttgagagag gcacatctca cgcctgagtg tgaaaaccca atcattatgc |
| 5101 | taatgaacta caaaaggatc agagagctcc tctctattaa aaccagggag aggatgggcg |
| 5161 | tggtggctca tgcctgtaat cccagcacgt tgggagcccg aggcaggtgg atcactaggt |
| 5221 | ccgcctagtg agttcgagac cagcctggcc aatatggtga aaccctgtct ctattaaact |
| 5281 | acaaaaatta gccaggcatg gtggtgggcg cttgtagtcc cagttactct ggaggctgag |
| 5341 | gcaggaggat agcttgaacc tgggaggcag aggttgcagt gagccaagat cgtgccactg |
| 5401 | cactccagcc tgggtgacag agcgagactc cgtcttaaaa aaaacaaaaa acaaaacaaa |
| 5461 | acaaaaaaac agggagagtc tccttcctat ctagacagca gggctacaga gggtcagagg |
| 5521 | aaaacagttt ggaggaagac aaagggttaa gacccatgac tcctcgcagc ctggctgcca |
| 5581 | tccgggatta cagcccagga atgaggcctg aacagaagga ggctctggca aagcgactgc |
| 5641 | tggcccctga actgtttggg gaagtgcctg cctggcccca ggagctgctg tgggcagtgc |
| 5701 | tgcccctgct cccccacctc cctctggaga actttttgca gctcagccct caccaggtat |
| 5761 | gagaatcatc ttctttactt gactggccca tcttctgcta gtggggacaa agagtcaatg |
| 5821 | gcatgtctct cagtggcccc tccctgcaag aaccctatag tgaccccagt gcgagctaac |
| 5881 | cttccccatc tcagatccag gccctggagg atagctggcc agcagcaggt ctggggccag |
| 5941 | ggcatgcccg ccatgtgctg cgcagcctgg taaaccagag tgtccaggat ggtgaggagc |
| 6001 | aggtacgcag gtgagttgtt gtgggatcag taaccaaggc aagagtggaa gaggtagaga |
| 6061 | gaggaaggca cagcbgtcac gcbgggtcgg tgttctagga agaaaggggc aagagagtag |
| 6121 | gcagtggcct caggcagcat agagttccag gagagaggtc tatagatggt gcccctgtgt |
| 6181 | agtggtgtag tgtcagagtg cccagtgtat gtacccatac catctgctgc caggcctgcc |
| 6241 | ttagtgctag tcttggggac cacacaaagg tcagcttcat gccctcctca ggcttgggcc |
| 6301 | cctcgcctgt ttcctgagcc ctgaggagct gcagagccta gtgcccctga gtgatccaac |
| 6361 | ggggccagta gaacgggggc tgctggaatg tgcagccaat gggaccctca gcccagaagg |
| 6421 | acgggtgagc ccctcagcac aagcctacaa gactttaggc ttcccctggg tctgtgtgga |
| 6481 | tggctttccc attgtgtcaa cttgagcaca gtggtgccag cccccatccc acttttgcaa |
| 6541 | cctccattcc ttactccatg gccattctta cctgttacca cctcttcctg gcccttctct |
| 6601 | atctggtctg tagcacccca aacataccct ttgccatttt gaacctaatc tactccagtc |
| 6661 | caatccctag ttccaaaccc tagcccaggc cctgggaaat tcagatgtgg gattagagag |
| 6721 | gaagttcaag gttcatctgt cttttctctc cagtcctaaa ccttctttgg ttacaggtgg |
| 6781 | catatgaact tctgggtgtg ttgcgctcat ctggaggagc ggtgctgagc ccccgggagc |
| 6841 | tgcgggtctg ggcccctctc ttctctcagc tgggcctccg cttccttcag gagctgtcag |
| 6901 | agccccagct tagagccatg cttcctgtcc tgcagggaac tagtgttaca cctgctcagg |
| 6961 | tttgcctgtc tcactccctg gcatgtaccc tccatccccg cttgagcccc agtcaagaga |
| 7021 | atcccattca gggataaaag cagcccctcc tttccctggg tgaacagtag aggtaaactc |
| 7081 | tgtctgcagg aggacgcctt cattcccttt cctcagatca agaagggacc tgagtcactg |
| 7141 | aggatggtta ctggggatgg ttaagaggca gcgggaagtt ttggagggtt tgccttagga |
| 7201 | acccacttag gacctggctg ctgggtcctg agagcbgttg ttttcggtcc catcccaaca |
| 7261 | caggcbgtcc tgctgcttgg acggctcctt cctaggcacg atgtgagtag cagcaacttc |
| 7321 | tcagcctccc gccagaggtc tctatcctct tttaacctgg ctcctgcatc tgcccctcct |
| 7381 | ctctctccgc tcccctcata cttactgcct tgctgcattg tgattgttgt cttccccaac |
| 7441 | acccttccct tcttcttcag gcctcttgtc tctcttgctc tttagctatc cctggaggaa |
| 7501 | ctctgctcct tgcaccttct gctaccaggc ctcagccccc agacactcca ggccatccct |
| 7561 | aggcgagtcc tggtcggggc ttgttcctgc ctggcccctg aactgtcacg cctctcagcc |
| 7621 | tgccagaccg cagcactgct gcagaccttt cgggtatgag agtggcaagg aggatgagat |
| 7681 | aatcagggat accggctctt tctggttggg aggaaggcat cttccctgag gccagggaag |
| 7741 | gcctttcata cctccccact tacacacaca cacacacaca cacacacaca accaattctc |
| 7801 | atgcaggtta aagatggtgt taaaaatatg ggtacaacag gtgcbggtcc agctgtgtgc |
| 7861 | atccctggtc aggtaagtgt gagatctccc aactgagctc ctctccccat tctggggcag |
| 7921 | tttcatatgg ctggtgctac ctcccacact accctgcagt ggccctgaga gttctggtta |
| 7981 | gctctgtgcc cattagcagc cctccccagt gccagatgca ggacagcatg atccactcac |
| 8041 | attgtcctag actaatgtca aagctggaag ggcctgagaa atcttccagg ccacccaccc |
| 8101 | tgctttcaga tgaaaagacc aaggcbggga gaagctaagg gactttgttt gcctggtgcc |
| 8161 | taactagcag caacacttga ccacagcagc ctgcagtgtg aggctcttag gcgtttattg |
| 8221 | ctacagtggc aaatgccatt ccacttctgt cctagctttg gtccctttcc acccccatgg |
| 8281 | ttccttttct ctgagtgcta agtacagact ctctcaccta tcactacact gctataccca |
| 8341 | tcaccgccag cagcctattc ccaccacctg gccagactgc ctgcttcccc tgctcccatt |
| 8401 | aaagctgcta caactggatt ccttggctct tctggcaaat cgaagacgct actgggagct |
| 8461 | gccctggtct gagcagcagg taattctccc cacttaattt cagaacttcc tccctcaatg |
| 8521 | tagtctacct tctttaccta tcccttagcc ctatttggcc agcttatccc tactatcctt |
| 8581 | tatttgattg tttgagatac agtctcactc tgttgcccag gctgcagtgc agtggcatga |
| 8641 | tcagagttcg ctgtaacctc aaactcatga gctcaggcaa tctttctgcc tcagcctcct |
| 8701 | gaatagctag gatgacaggt ggttaccacc atgcctggct aatttttaaa tttttttttt |
| 8761 | gttttttgag atgaagtctt gctctgtcac ccaggcttga gtacagtggc acaagcttgg |
| 8821 | ctcactgcaa cctctgtctc ccgggttcaa gcgattctcc tgcctcagcc tcccgagtag |
| 8881 | ctgggactac aggcactccc cacaatgccc ggctaatttt ttttttgttt tagtagagac |
| 8941 | agggtttcac catattggcc aggctggtct cgaactgctg accttgtgat ctgcctgcct |
| 9001 | ctgcctctca aagtgctggg attacaggtg tgagccacca tgcccggcca atttttaaat |
| 9061 | tttttgtaga gacagacaat acaaaaatgt ggacactatg tggagacact atgttgaggt |
| 9121 | actatgctgt ccagattggt cttgaactcc tggcctcaag caatcctcct gccttggcct |
| 9181 | cccaaagtgc tgggattaca gacctgagcc actgcaccca gccccctagt atcccttata |
| 9241 | atgtgacttg cttttctttt tctttctcct tcccttttct ttcatttctt tctcactctc |
| 9301 | gagagaagag tgggcatctg ggagagtggg aggctggtgg gtcccacaga gtgaggaggc |
| 9361 | aggactgggt ccaaggcagt cctgcctctc cactctaggg ggtatccttg gacagtgtct |
| 9421 | cttctgggaa ggggctcgtc tttctttctc ttgtaggcac agtttctctg gaagaagatg |
| 9481 | caagtaccca ccaacctgac cctcaggaat ctacagtgag taacttgtgt tgagcagtgc |
| 9541 | gctgaattcg accaacattt ttttgagtgc ttactatgtg ccaggcacca tatgatatgg |
| 9601 | aatgggggat atagggatga atgatgcata gtccctgcct cgtggacgtt ctcctagcac |
| 9661 | ctccctttgc cctcctttcc ttccacagtg ccatgcctat cctgactaga gccaaaggac |
| 9721 | tcagaaaacc tggattcagg ttccagtcct gtcacctact tgtcctcttg ggcaagtcat |
| 9781 | ttaacgtccc tgtgtcagtt ttcccttctt taaatgagaa ttacaatggc accagcctca |
| 9841 | taggtagtta ctgtgaagat taaatgaggt aggtcatgta agatatttaa cacagtgttt |
| 9901 | ggtccattgt aaagttccag tagtcatttg ctactgttag tttacttcag gatgacttca |
| 9961 | gaggcactgg ccaagcaaga ataaatagga ataagaaggt atcactttac ttatacccac |
| 10021 | attagaagaa caatgggctt cagaatcttt tttttttttt ttttcgagac agtcttgctc |
| 10081 | tgttgcccag gctggagtgc agtggcgcga tttcggctca ctgcaacctc tgcctcccag |
| 10141 | gttcaagcga ttctcctgtc tcagcctctg gagtagctgg gattacagga atgtgccacc |
| 10201 | atacccagct aatttttgta tttttagtag agatggggtt tcaccatttt ggccaggctg |
| 10261 | gtctcaaact cctgacctca ggtgatccac ccgcctcagc ctcccaaggg cttcagaatc |
| 10321 | taagacatgt ctctagtttc agtttaccac atttctagca gaatgatgtt gggaatgtca |
| 10381 | cctgacttcc ataaatcctt attttctcct ctgataaaca gcagtgatgt tatggggagc |
| 10441 | tgatgagata tctatgtaaa aacatttctc aaaccataaa ttacggtgga tgaacatctg |
| 10501 | tacttgtgtt gagagtactg atatcaagga gcaaacaggc tgttgtatgt gttgaatgag |
| 10561 | cctctcccca ctcacacacc cacagggctc tgggcaccct ggcaggaggc atgtcctgtg |
| 10621 | agtttctgca gcagatcaac tccatggtag acttccttga agtggtgcac atgatctatc |
| 10681 | agctgcccac tagagttcga gggagcctgg tgagagggga tgcctggact ttagtgggag |
| 10741 | cagggaggct gggaccctag gtatagaacc cagctcctat gttctgctct ggcctcactc |
| 10801 | tgcttcccta cagagggcct gtatctgggc agagctacag cggaggatgg caatgccaga |
| 10861 | accagaatgg acaactgtag ggccagaact gaacgggctg gatagcaagc tactcctgga |
| 10921 | cttaccgtaa gtactgcagc tagagatatt ggcccctcag aaagctcaat ctggggtgaa |
| 10981 | gatctgccct tagggaatgc cctggaggag gtagtttttc tgtctggtag ttccctgaca |
| 11041 | taatttatag cccaaagcag aggattttat tcaaagttgc tctatgtatt gactggttcc |
| 11101 | cagaatatgc tccagcacag ggcagctgag ggtggcaaca ctgtattgaa gcctgccaag |
| 11161 | taatcttaca ataacctagt ccacattaat tgagattgag acagagcatc tgaagtgagg |
| 11221 | gaggcaatgc tccaaatctg ccccagagga ttgtagtttg ctcagggcac tgtgttctta |
| 11281 | gtgcattcag aggagtggat cgagagaaaa atatatgaaa aatgtgataa ataccttcaa |
| 11341 | atacctgagg ggctatcaag tagaaattag attgtcatat ttatgagtgg ccccattggg |
| 11401 | caagactaag agtagttaac ggagatcaga tttttacata gtataagaaa aactaaggta |
| 11461 | gtgagttcct ggtccttgga gcbgttcgag cctaagccag atggccccat ggcaggaatg |
| 11521 | ttgtagagca cgttcatata caggttgtgg gaagaaaagg ctataggaac ccaaggctcc |
| 11581 | tccctaccca tggagaaatt tattagtatg ttactcatat gctgcttttc tcattttacc |
| 11641 | cctaccacca ccccgttgcc atccgcactg taagtcagga taggaaaatg ctggtgttac |
| 11701 | agtcttcctg gggaatatgg agctgaagtg gagtaaaagc agttgacttc attcttactt |
| 11761 | ttttcttttt cttttttttt ttttttttga gacagagttt tgcbgtgtca ccaaggctgg |
| 11821 | agtgcagtga cgtgatctcg gctcactgca acctccatct tccaggttca agcaattctc |
| 11881 | ctgcctcagt ctcccgagta gcbgggactg taggtgtgca ccaccatgcc aggctaattt |
| 11941 | ttgtatttgt tgtagggacg agctttcacc atgttggcca ggcbggtctt gaactcctgg |
| 12001 | cttcaagtga tctgcccacc tcggcttccc aacattctta tatttttata ggcctttcca |
| 12061 | cagatttcag ctcttgtatg acttagccca gttccagaac tggtaatcct aggtagggta |
| 12121 | caggttatca cctctgattt cgggtaaaag ggatttattt atttatttgt ttatttattt |
| 12181 | atatttttga gacagagtct cgctctgtca cccaggctgg agtgcaatgg tgccatctcg |
| 12241 | gctcactgca acctctccct ctggggttca agcacttctg cctcagcctc ctgagtagct |
| 12301 | gggattacag gcgcgtgcca ccacacccgg ctaatttttg catttttagt agagacgggg |
| 12361 | tttcaccatg ttgctcaggg tggtctcgaa tttctgaccc tgtgatctgc ctgcctcggc |
| 12421 | ctcccaaagt gcbgggatta caggcatgag ccactgcgtc cggcctgttt ttactttttt |
| 12481 | ttaatgccat tcagatctgt ttaaatatgt gggttctgtg agataattta gaatcccaag |
| 12541 | gttacagatg aggtgaaaga tcctagacca tgcatcaaaa aacttgagtt tctcatttgt |
| 12601 | gaaagaagga taagagaaac acctattttg tctgggtgca gtggctcatg cctataatcc |
| 12661 | cagcatttgg ggaggccaag gtgggtggat cacggaggtc aggtgttcaa gaccagactg |
| 12721 | gccaacatgg caaaacacca tctctactaa aaatacaaaa gttagcbggg cgtggtggca |
| 12781 | cgtgcgtgta attccagcta ttcgggaggc tgaggcacga gaattgcttg aacctgggag |
| 12841 | gtgcgggttg cagtgaactg agatcgcagc accactgtgc tccagcctga gtgatggagt |
| 12901 | gaggccaggt cttgttgtag gatcaaatga gataacacct gaaagaactt tgtaaattgt |
| 12961 | atagcacgta caaacaagaa gggacctctt cacaagcaga ggaagggtgg tcctgtggaa |
| 13021 | aaaaacggga attgggagtg agagacctca acatttgatc tctgtgaacc tcagtttttt |
| 13081 | aatctataaa atggggaaat gttaatggta cttaatattt ggagcttttg agtccattag |
| 13141 | atcaggtagg attgttcgtt attttttttt tttaggaaga ctagaaatat gttgctccct |
| 13201 | ttttctcccc cactcaagct tgatggtggg aattggccct ggagcbgttt actgtcagtt |
| 13261 | cctgtccagc ttcactaaat ttggtctggg gtcacatctt agcbggggac tgtggggttc |
| 13321 | tgtggtccct tctcgacttg gcccagctcc acttgaatga tattgttgtc aaattgctat |
| 13381 | aatagaatcc agttgatgga cagactatcc aatgaatcca ttatgttggt ggtggagctg |
| 13441 | gtgcaaagag ctccagagca gctgctggca ctgacccccc tccaccaggc agccctggca |
| 13501 | gagagggcac tacaaaacct ggtaagagtc caccctacca gactcagatt tgctgccctg |
| 13561 | ggcaattctt gctcctcaga caatgctctc tgactgtcct ccaaccctct acttcttgct |
| 13621 | ttcttgctgc caaacaggtt cctgtctaca aggcctggcc cgttttgcct ctgggttctg |
| 13681 | ttccttgata atatgcttca cgttacttgt ccatacctct tggagtccga gaaatctctt |
| 13741 | ggagtccacc tctcagtctt tctgcctgct cctatctggt ctcattgctt aagaaagtga |
| 13801 | acaaaggtag tgagcatcat agggtgctga gttgggagca ggagggaggg aaggtcaggg |
| 13861 | ggcttggtgt cttgatcaag gtgtctggta ttctgagtca gaagtgcatt gtccaagttc |
| 13921 | tgatgctctt ctccaggctc caaaggagac tccagtctca ggggaagtgc tggagacctt |
| 13981 | aggccctttg gttggattcc tggggacaga gagcacacga cagatccccc tacagatcct |
| 14041 | gcbgtcccat ctcagtcagc tgtaaggctt ctgcctagga gagacatttg ccacagagct |
| 14101 | gggatggctg ctattgcagg agtctgttct tgggtatgga tcttcgagaa cttcagattc |
| 14161 | taactcattc tatacccagt ccctcagcca ccatcatcag tggcagcctg ttccatattc |
| 14221 | ctaagggccc ttggagccct gtgtccgaaa tcctagcatg tcctcttttc cccttccttt |
| 14281 | tcctcacagt tccctcagct ccccagcccc cgattttctt cctgtcccca ggaaaccaga |
| 14341 | gttgtggagc caggatgaag tagagcaagc tggacgccta gtattcactc tgtctactga |
| 14401 | ggcaatttcc ttgatcccca gggtgagatg aaggaagaag ggaagggagt aaatgcatag |
| 14461 | aggggactgg tgagctggtt atggggaccc gtggccaacg agggcaaagg atatgaagcc |
| 14521 | tagatctggg gggatactgc gaaacagaga caggactttg gacttatagc tatagcagca |
| 14581 | ggtcctgatc tgtccagatc tccccactct ccttctacct tctcatgcag gaggccttgg |
| 14641 | gtccagagac cctggagcgg cttctagaaa agcagcagag ctgggagcag agcagagttg |
| 14701 | gacagctgtg tagggggcca cagcttgctg ccaagaaagc agccctggta gcaggggtgg |
| 14761 | tgcgaccagc tgctgaggat cttccaggtg aaactaccca aatacttata tgtccagcag |
| 14821 | gatgtacagg gagtatcaaa cggtctgggt tctacatgtg cttttctctg ggactgggtt |
| 14881 | ttctaattta taaagcaaag agtttagagg gatgatcttc aagtctcgtc tagttctaaa |
| 14941 | attctatagc tctgggagtg tgtaaactat taagttttcc tttagcccag aacttccatt |
| 15001 | ttcctgctgt cttgtctctt taaacagctg actcagctct agctcggcta agtgtggagc |
| 15061 | tctctgctgg ggagatccct cgaaggagac attgtgaggc tagagaactg gtttcaaatt |
| 15121 | cagctctgcc atgaaatccc tgaccaacat cctcagtctt ccatctataa aatgagggac |
| 15181 | ttggcatctc caatcacttc ttgttcaatt cacttctaag ccctatacat cttaacctgt |
| 15241 | aatactccct cgatccctac ttcccacagt gctccatcct ccaaaggttg gaagagtcat |
| 15301 | tccatctaca gatacctcct ggccctgcct tcccccttca gaacctgtgc caaattgtgc |
| 15361 | agatgtacga gggacattcc cagcagcctg ctctgcaacc cagattgctg agatggagct |
| 15421 | ctcagacttt aaggactgcc tgacactatt tgcaggagac ccaggacttg ggcctgagga |
| 15481 | accacgggca gccatgggca aagcaaaatg ggtcagggac ggagagccaa ctgaggttgg |
| 15541 | ccatgaggaa gctgtgtggg tgtgatgtag gacacgaaga gaatagagag ttggatgaga |
| 15601 | ggtgggggaa gcagaagata aaagagttag aagatttggg tcacaagtag aaggtgagga |
| 15661 | gagataaata ttgaggaaag agagctacta taatgaatag agggactaaa gcagtgatta |
| 15721 | ccaaatttta atgcatatca caatcatcaa gggaacagat ttttttcttt tttctttttt |
| 15781 | tttctttctt aaaaaataat ggcatacttc atgaatttgt gtgttatcct tgcgcaggcg |
| 15841 | ccatgctaat ctctgtatca ttccaatttt tttttgtata tgtgctgctg aaccgagcac |
| 15901 | gggaacagtg ccaatgctgg attaccatgc tagactgact taataaaaac ctttgcggag |
| 15961 | gctggacgga gtggctcgtg cctgtaatca cagcactttg ggaggctgag gcaggtggat |
| 16021 | tgcttgagcc caggagtttg agaccagact gggcaacatg gtgaagccct gtctctacta |
| 16081 | aaaatagaaa aaaaattagc tgggtgtggc ggcacatgcc tgtaatccca gctactcagg |
| 16141 | aggcbggggt aggagaatcc cctgagcgca ggaggtggag ggtgcaatga gccaagatca |
| 16201 | caccactgca ctccagcctg ggtgtcagag caagaccctg tctcataaat taaaaaataa |
| 16261 | gcctctggga gaaagtctag acatctgcat ctgctttttt tttttttttt ttttttgaga |
| 16321 | cacagtctca ctctgtcacc cagcatccag gctggagtgc ggtggtgtga tcttggctca |
| 16381 | ctgtaacctc tacatcctgg gctcaaacga tcctcctgcc tcagcctctc gagaagctgg |
| 16441 | gactacaggt gcacaccact acacctggct aatttttgta tttttggtag agatgaggtt |
| 16501 | tcgcbgtgtt gcccaggatg gtcttgaact cctgggctca agcattcctc ccacctcagc |
| 16561 | ctcccaaagt gcbgggatta cagctgtgag ccactgtgct gggccccagg catctgcatt |
| 16621 | ttaataagcg tctctgtgtc tgatgcacat aaaagtgtgg aactcatgga ctagagttag |
| 16681 | tttgctcttc ttttccactg attgtaatgt ctttcaaaac accttagagg aactgtaagg |
| 16741 | caacggtctc attttatagt ggaggaaacc aaagaaaagg caagtgactt gcctagagtt |
| 16801 | atacagctaa ggtcagaggc aagacttaaa acccagcatt ctgactccca atctactggt |
| 16861 | tttccactca cattgttcct ctctttctcc tagttgtggg gtcccccccg gggatttggt |
| 16921 | cctgagcaga tcctgcagct cggtagactc ttaataggtc tgggagatca ggaactacag |
| 16981 | gagctgatcc tagtggactg gggagtgctg agcaccctgg ggcagataga tggctggagc |
| 17041 | tccactcagg taacactttt actcctccct accgcttccc aaacacccat cccacagacc |
| 17101 | cagccctata gatcatctaa agcccaagga attttttcct gtgaccctac ctggtcattc |
| 17161 | tttctgtctt ttgttaatat cccatactag tgaccttcag gactcttgat ttattcactc |
| 17221 | tgaggccctg gacacataat actgtctcct acctcttttc ctggaggctt cctctttttc |
| 17281 | tttccttttc ttttctgagt cctcagcctt ccccatgact ccttaggtct taatagtaac |
| 17341 | agaatataac ccagtaacac ctatcacttc cctgtccatt aattctccat aactttcctc |
| 17401 | cttcccctct tctcccaccc cccaccccag ctccgcattg tggtctccag tttcctacgg |
| 17461 | cagagtggtc ggcatgtgag ccacctggac ttcgttcatc tgacagcgct gggttatact |
| 17521 | ctctgtggac tgcggccaga ggagctccag cacatcagca gttgggagtt taggtcattt |
| 17581 | gtgaaggggc tgagggtggt cgtgttcagg taaaggtgga cttgcbgggg aaaggaggat |
| 17641 | catgaagtta tagtcccatg gaggaaggga actcatttga agccatctct tcctttgtct |
| 17701 | catgaccaca gtccctttca ctgaagccga attcttcttc cttccttccc actgttctac |
| 17761 | agccaagcag ctctcttcct gggcaccctg catctgcagt gctctgagga acaactggag |
| 17821 | tttctggccc acctctttgt actgcctggt gggtttggcc caatcagtaa ctgggggcct |
| 17881 | gagatcttca ctgaaattgg caccatagca ggtggggagc tgggccactg ctggtgcaag |
| 17941 | ttggtttggt ttctatacca tgggtggact ggatggaaga ctgccctgca attcttcagg |
| 18001 | tgtgggcctg agagggtgtt taaataaggg gctagagaca tattggggaa ggtctatgat |
| 18061 | agggcacttt gggagtagtt agagaaggtc tataggtttg aagagaggga aggtcagtct |
| 18121 | aagacaatgt ttggatgcca cttgcttcaa cagcbgggat cccagacctg gctctttcag |
| 18181 | cactgctgcg gggacagatc cagggcgtta ctcctcttgc catttctgtc atccctcctc |
| 18241 | ctaaatttgc tgtaagtatt aatggactgg ggtgaccaca ggagagccag ggcccaatgg |
| 18301 | ggactacatg catgcactga ttcctacccc tgccctcagg tggtgtttag tcccatccaa |
| 18361 | ctatctagtc tcgccagtgc tcaggctgtg gcbgtcactc ctgagcaaat ggcctttctg |
| 18421 | agtcctgagc agcgacgagc agttgcatgg gcccaacatg agggaaagga gagcccagaa |
| 18481 | cagcaaggtg agttcccagc tgcacagctt gatcctccat ctcctgaccc agaatcaaac |
| 18541 | ccctaatttg gtgcbgtctg gctcttagag tgcacccagg gagatccctg gagtgaagga |
| 18601 | gtctacaggc agagcgctaa tttccaagta tcaatgctcc tggagagctg agttgtgata |
| 18661 | ttactcccat tccctgtcta ttataggtcg aagtacagcc tggggcctcc aggactggtc |
| 18721 | acgaccttcc tggtccctgg tattgactat cagcttcctt ggccacctgc tatgagcctg |
| 18781 | tctctacagt agaaggagat tgtggggaga gaaatcttaa gtcataatga ataaagtgca |
| 18841 | aacagaagtg catcctgatt attttcagaa gctgatgagg aata |

### Clarin 1 (CLRN1)

[0157] The CLRN1 gene encodes “clarin 1” (CLRN1), a protein that is expressed in hair cells of the inner ear (e.g., inner ear hair cells, outer ear hair cells) and in the retina.

[0158] The human CLRN1 gene is located on chromosome 3q25.1. It contains 7 exons encompassing ˜47 kilobases (kb) (Vastinsalo et al. (2011) Eur J Hum Genet 19(1): 30-35; NCBI Accession No. NG_009168.1).

[0159] Various mutations in the CLRN1 genes have been associated with Usher syndrome type III (e.g., Usher syndrome type IIIA (MIM #606397) (see, e.g., Fields et al. (2002) Am J Hum Genet 71: 607-617, and Joensuu et al. (2001) Am J Hum Genet 69: 673-684) and retinitis pigmentosa (see, e.g., Khan et al. (2011) Ophthalmology 118: 1444-1448). Usher syndrome type III-causing mutations have been predominantly found in exon 3 of CLRN1. Usher syndrome type III-deafness can be modeled by generating CLRN1-deficient mice (see, e.g., Geng et al. (2017) Sci Rep 7(1): 13480). Exemplary mutations CLRN1-associated with Usher syndrome type III include: T528G, M120K, M44K, N48K, and C40G.

[0160] Exemplary mutations CLRN1-associated with retinitis pigmentosa include L154W and P31L (see, e.g., Khan et al. (2011) Ophthalmology 118: 1444-1448).

[0161] Additional exemplary mutations in a CLRN1 gene that have been detected in subjects having hearing loss and methods of sequencing a nucleic acid encoding CLRN1 are described in, e.g., Fields et al. (2002) Am J Hum Genet 71: 607-617, Joensuu et al. (2001) Am J Hum Genet 69: 673-684, Adato et al. (2002) Europ J Hum Genet 10: 339-350, Aller et al. (2004), Clin Genet 66: 525-529. Methods of detecting mutations in a gene are well-known in the art. Non-limiting examples of such techniques include: real-time polymerase chain reaction (RT-PCR), PCR, sequencing, Southern blotting, and Northern blotting.

[0162] An exemplary human wildtype CLRN1 protein is or includes the sequence of SEQ ID NO: 39, SEQ ID NO: 41, SEQ ID NO: 43 and SEQ ID NO: 45. Non-limiting examples of nucleotide sequences encoding a wildtype CLRN1 protein are or include SEQ ID NO: 40, SEQ ID NO: 42, SEQ ID NO: 44 and SEQ ID NO: 46.

[0163] In some embodiments of any of the compositions described herein, the CLRN1 protein comprises a sequence that is at least 75% (e.g., at least 80%, at least 85%, at least 90%, at least 91%, at least 92%, at least 93%, at least 94%, at least 95%, at least 96%, at least 97%, at least 98%, at least 99%) identical to SEQ ID NO: 39.

[0164] In some embodiments of any of the compositions described herein, the CLRN1 protein comprises a sequence that is at least 75% (e.g., at least 80%, at least 85%, at least 90%, at least 91%, at least 92%, at least 93%, at least 94%, at least 95%, at least 96%, at least 97%, at least 98%, at least 99%) identical to SEQ ID NO: 41.

[0165] In some embodiments of any of the compositions described herein, the CLRN1 protein comprises a sequence that is at least 75% (e.g., at least 80%, at least 85%, at least 90%, at least 91%, at least 92%, at least 93%, at least 94%, at least 95%, at least 96%, at least 97%, at least 98%, at least 99%) identical to SEQ ID NO: 43.

[0166] In some embodiments of any of the compositions described herein, the CLRN1 protein comprises a sequence that is at least 75% (e.g., at least 80%, at least 85%, at least 90%, at least 91%, at least 92%, at least 93%, at least 94%, at least 95%, at least 96%, at least 97%, at least 98%, at least 99%) identical to SEQ ID NO: 45.

| Human Full-length Wildtype CLRN1 Protein Isoform D | |
|---|---|
| (SEQ ID NO: 39) | |
| MPSQQKKIIFCMAGVFSFACALGVVTALGTPLWIKATVLCKTGALLVNASGQELDKFMGEMQYGLFHGEGV | |
| RQCGLGARPFRFSFFPDLLKAIPVSIHVNVILFSAILIVLTMVGTAFFMYNAFGKPFETLHGPLGLYLLSF | |
| ISVALWLPATRHQAQGSCGCLVMILFASEVKIHHLSEKIANYKEGTYVYKTQSEKYTTSFWVIFFCFFVHF | |
| LNGLLIRLAGFQFPFAKSKDAETTNVAADLMY | |
| Human Wildtype CLRN1 Isoform D cDNA | |
| (SEQ ID NO: 40) | |
| atgccaagccaacagaagaaaatcattttttgcatggccggagtgttcagttttgcatgtgccctcggagt | |
| tgtgacagccttggggacaccgttgtggatcaaagccactgtcctctgcaaaacgggagctctgctcgtca | |
| atgcctcagggcaggagctggacaagtttatgggtgaaatgcagtacgggcttttccacggagagggtgtg | |
| aggcagtgtgggttgggagcaaggccctttcggttctcattttttccagatttgctcaaagcaatcccagt | |
| gagcatccacgtcaatgtcattctcttctctgccatccttattgtgttaaccatggtggggacagccttct | |
| tcatgtacaatgcttttggaaaaccttttgaaactctgcatggtcccctagggctgtaccttttgagcttc | |
| atttcagttgccctttggctgccagctaccaggcaccaggctcaaggctcctgtggctgtcttgtcatgat | |
| attgtttgcctctgaagtgaaaatccatcacctctcagaaaaaattgcaaattataaagaagggacttatg | |
| tctacaaaacgcaaagtgaaaaatataccacctcattctgggtcattttcttttgcttttttgttcatttt | |
| ctgaatgggctcctaatacgacttgctggatttcagttcccttttgcaaaatctaaagacgcagaaacaac | |
| taatgtagctgcagatctaatgtactga | |
| Human Full-length Wildtype CLRN1 Protein Isoform A | |
| (SEQ ID NO: 41) | |
| MPSQQKKIIFCMAGVFSFACALGVVTALGTPLWIKATVLCKTGALLVNASGQELDKFMGEMQYGLFHGEGV | |
| RQCGLGARPFRFSFFPDLLKAIPVSIHVNVILFSAILIVLTMVGTAFFMYNAFGKPFETLHGPLGLYLLSF | |
| ISGSCGCLVMILFASEVKIHHLSEKIANYKEGTYVYKTQSEKYTTSFWVIFFCFFVHFLNGLLIRLAGFQF | |
| PFAKSKDAETTNVAADLMY | |
| Human Wildtype CLRN1 Isoform A cDNA | |
| (SEQ ID NO: 42) | |
| atgccaagccaacagaagaaaatcattttttgcatggccggagtgttcagttttgcatgtgccctcggagt | |
| tgtgacagccttggggacaccgttgtggatcaaagccactgtcctctgcaaaacgggagctctgctcgtca | |
| atgcctcagggcaggagctggacaagtttatgggtgaaatgcagtacgggcttttccacggagagggtgtg | |
| aggcagtgtgggttgggagcaaggccctttcggttctcattttttccagatttgctcaaagcaatcccagt | |
| gagcatccacgtcaatgtcattctcttctctgccatccttattgtgttaaccatggtggggacagccttct | |
| tcatgtacaatgcttttggaaaaccttttgaaactctgcatggtcccctagggctgtaccttttgagcttc | |
| atttcaggctcctgtggctgtcttgtcatgatattgtttgcctctgaagtgaaaatccatcacctctcaga | |
| aaaaattgcaaattataaagaagggacttatgtctacaaaacgcaaagtgaaaaatataccacctcattct | |
| gggtcattttcttttgcttttttgttcattttctgaatgggctcctaatacgacttgctggatttcagttc | |
| ccttttgcaaaatctaaagacgcagaaacaactaatgtagctgcagatctaatgtactga | |
| Human Full-length Wildtype CLRN1 Protein Isoform C | |
| (SEQ ID NO: 43) | |
| MQALQQQPVFPDLLKAIPVSIHVNVILFSAILIVLTMVGTAFFMYNAFGKPFETLHGPLGLYLLSFISGSC | |
| GCLVMILFASEVKIHHLSEKIANYKEGTYVYKTQSEKYTTSFWLTKGHS | |
| Human Wildtype CLRN1 Isoform C cDNA | |
| (SEQ ID NO: 44) | |
| atgcaggccctgcagcagcaaccagtttttccagatttgctcaaagcaatcccagtgagcatccacgtcaa | |
| tgtcattctcttctctgccatccttattgtgttaaccatggtggggacagccttcttcatgtacaatgctt | |
| ttggaaaaccttttgaaactctgcatggtcccctagggctgtaccttttgagcttcatttcaggctcctgt | |
| ggctgtcttgtcatgatattgtttgcctctgaagtgaaaatccatcacctctcagaaaaaattgcaaatta | |
| taaagaagggacttatgtctacaaaacgcaaagtgaaaaatataccacctcattctggctgactaaaggcc | |
| acagctga | |
| Human Full-length Wildtype CLRN1 Protein Isoform E | |
| (SEQ ID NO: 45) | |
| MPSQQKKIIFCMAGVFSFACALGVVTALGTPLWIKATVLCKTGALLVNASGQELDKFMGEMQYGLFHGEGV | |
| RQCGLGARPFRFSCYFLDPFMGLPTGVPHLLSLPCSTSCRREHTSERVQEPAGCFSAVRSKLHAGPAAATS | |
| FSRFAQSNPSEHPRQCHSLLCHPYCVNHGGDSLLHVQCFWKTF | |
| Human Wildtype CLRN1 Isoform E cDNA | |
| (SEQ ID NO: 46) | |
| atgccaagccaacagaagaaaatcattttttgcatggccggagtgttcagttttgcatgtgccctcggagt | |
| tgtgacagccttggggacaccgttgtggatcaaagccactgtcctctgcaaaacgggagctctgctcgtca | |
| atgcctcagggcaggagctggacaagtttatgggtgaaatgcagtacgggcttttccacggagagggtgtg | |
| aggcagtgtgggttgggagcaaggccctttcggttctcatgctattttcttgaccccttcatgggactccc | |
| aacaggggtaccccatttactcagcctgccctgctcaacctcttgcaggagggagcacacgagtgaacgag | |
| tgcaggaaccagctggctgctttagtgctgtgaggagtaaactccatgcaggccctgcagcagcaaccagt | |
| ttttccagatttgctcaaagcaatcccagtgagcatccacgtcaatgtcattctcttctctgccatcctta | |
| ttgtgttaaccatggtggggacagccttcttcatgtacaatgcttttggaaaaccttttga | |
| Human Wildtype CLRN1 Genomic sequence (NCBI Accession No. NG_009168.1) | |
| (SEQ ID NO: 47) | |
| 1 | aggagatact tgaaggcagt ttgaaagact tgttttacag attcttagtc caaagatttc |
| 61 | caattaggga gaagaagcag cagaaaagga gaaaagccaa gtatgagtga tgatgaggcc |
| 121 | ttcatctact gacatttaac ctggcgagaa ccgtcgatgg tgaagttgcc ttttcagctg |
| 181 | ggagctgtcc gttcagcttc cgtaataaat gcagtcaaag aggcagtccc ttcccattgc |
| 241 | tcacaaaggt cttgtttttg aacctcgccc tcacagaagc cgtttctcat catgccaagc |
| 301 | caacagaaga aaatcatttt ttgcatggcc ggagtgttca gttttgcatg tgccctcgga |
| 361 | gttgtgacag ccttggggac accgttgtgg atcaaagcca ctgtcctctg caaaacggga |
| 421 | gctctgctcg tcaatgcctc agggcaggag ctggacaagt ttatgggtga aatgcagtac |
| 481 | gggcttttcc acggagaggg tgtgaggcag tgtgggttgg gagcaaggcc ctttcggttc |
| 541 | tcatgtaagt agcaattgca tttgagttat ttaatgcttt aggcagactc ttcccagtgt |
| 601 | tgcgaggaat tatatttgag aattttgccg tgtttactgc aggacttttt aaatcggtgt |
| 661 | gaaccatatg aaaaacctat gactctgagc aatttcttct tcctagtttt tattatttta |
| 721 | tacttgcttt ttattataat atagagttaa ttcattgtta cataattaag gtttttggaa |
| 781 | atattggcaa ttaagatgct taagtattaa tatttatgta aaaaattatg gagtcttttt |
| 841 | aaaaaagtaa acttggggaa ataggaaagc tgtaaagaat gatctttatg ctttttgttc |
| 901 | tttataaaaa gaaccaaggt catgggctcc gtatttaacc aggttgccac ctttctcatg |
| 961 | attttgtttc ctgctcccca ctccctccca ttattcctgc taagaccttt cctgctgcta |
| 1021 | aatattcagt tttcattttt aactaatttg gaatcatttg gctatagaaa tttaaaatga |
| 1081 | tctgcbgtgc taactgggaa agaaatggat gcctatttag tatagaacat tttaaactga |
| 1141 | ttgacctgca aatcatgtag agaatatgag agagattttc ttgttgtgat ttttgtgaaa |
| 1201 | tggaagtgta atccacagta tttataacct gtttatctta agaagagaat ttttaaaaat |
| 1261 | taccatgtga ataggcaact cattaaatga aaattaatag gaagtcattt gttatatctc |
| 1321 | ttacaacaca cattcagaag ttattattat ttcagaaggg ctggtttgga acaaccttat |
| 1381 | gaagacacag tcagtaaatt actgcataaa tcactcttca ggaaaggagg ttaccaactg |
| 1441 | aagcatttaa aatgaattat tattttgccc aggttttttt tttctttcta gtataggtag |
| 1501 | aaggctaaat taattgaatt tattattaac atatgcagtg cctaattaaa tttcagtgct |
| 1561 | ggtctattta tatttctgca acattcctta tatcttctta gcagtcattg gacaccaacc |
| 1621 | ttcagctcac ataggttact aagtgatatg aattttcata gggctccaga aaatttccaa |
| 1681 | gaattggttg ttagcttttt aattgatgaa gtggatacca gttcttttca ctgaatggct |
| 1741 | tttattcatt aaggtaatgg ggcbgttaga gttgcttagt tttcctgggg aaggggaagg |
| 1801 | aagaaaacaa agcagaatgt catgtgatat gcaactgtat taaaaaaccg aaaaggaaaa |
| 1861 | aagttgagag agatgattta accgtgagtc accggcagcc aaagcgtgag taaagcttct |
| 1921 | cacagatgaa tttagacaaa agcggagaag gtactggtga attttctgga gcctttacat |
| 1981 | tttctacagt gaaatggaga taaactttac tcatgccata ggacatgttt caaaacaata |
| 2041 | ataagatgtt ttctgaacac ttactacata ctaagcactt tatatgcttt gtctcattta |
| 2101 | atccttacac agccacattc ttctggggtt tagcgaatga tttttgtggt tgtgtcctat |
| 2161 | gcttgtcctg tctaaggatg aagttgttct aattgggtgc ccctcctttt gctttctgtg |
| 2221 | aggacttgca gaactggtgg ggtttaaaca gtaccctcac ttatctcaca gaatttcatt |
| 2281 | agctcccaga tacccctgac attctccccc tagcctagtg aagaaaatct tccatttact |
| 2341 | tgttcattct gcagtgacag ctccatcaat atacaataga ctatacatat taagtgtact |
| 2401 | gtatatacta tacatgttaa aaatctcatt cattttggtg aggcccagct aagaatactt |
| 2461 | acagtagagc tttttttttt ttcctaagca taaaagtatc tttttcaatg cagcatgaga |
| 2521 | cagagttggg aaaaccaaaa taaatagatc caatggactc cccaaagagg ataatattca |
| 2581 | tttaaataaa cacccctctc agtgttaaaa ctttctaatc aacatgcctt tgggacacat |
| 2641 | tgcaccctca aagtttacac tcccattgca acgcagcttt gtggttcacg ttttttccat |
| 2701 | tcagaatgtc attaccctgt caatgatgtt tcatcaacgt ttgcttggat gagaatcctc |
| 2761 | tgatattctt cctgatagaa atgtataagc cctgttcata taaatgaata aaagatctaa |
| 2821 | ccttactttc tcagtagtgg cttccttgga gcaaaaagca gggacctcca gagagctcag |
| 2881 | gtggatgact cttttctgtt tcttccagag ctcaacttac aattagtgca caattcattt |
| 2941 | cccagaatgt cttctttctt attgtgcctt tagaaagtta ttaagcaaac atttgaattc |
| 3001 | acagaatctt accagtgtaa gaggaatgga aaaggtaact tatcaaggta acaatcactt |
| 3061 | cgtggccagt tttttcggct cactgcaact acccctcctg ggttcaagcg attctcctgc |
| 3121 | ctcagcctcc caagtagctg ggactacagg cgtgcaccac catgcccagc taattttttt |
| 3181 | tttgtatttt tagtaaagac agggtttcac catgbgggcc aggctggtct catggcaagt |
| 3241 | tttctttgtg ttgtcatgtt attatcaatt aataggaatt tatatttcag ttctgttagg |
| 3301 | tggataaaca ctattttgca tacctaaatg tttcatttat atcagcactg gccaataaaa |
| 3361 | atatactata agcaggccgg gtgcagtggc tcacgcctgt aatcccaact tttgggaggc |
| 3421 | caacactttg ggaggacaca gggtcaggag atcgagacca tcctggctaa cctggtgaaa |
| 3481 | tcccgtctct actaaaaata caaaaaatta gccgggcgtg gcgggggcgc ctgtagtccc |
| 3541 | agctacttgg gaggctgagg caggagaatg gcacgaaccc gggaggtgga gcttgcagtg |
| 3601 | agccgagatc tcgccactgc actccagcct tggtgacaga gcaagactct gtctcaaaaa |
| 3661 | aaaaaaaaaa aaaaaaaaaa aaaaaatata tatatatata tatatattac aagccacaag |
| 3721 | ccacatatgt acttttaaat gtcctagtag ccatattaga aaacaaaagt aaaaaggaat |
| 3781 | agatgaaatt aattttaatg atttttttaa acccaagata tccaaaatat tatcatttta |
| 3841 | acatataatt aaaaatttat tgagatgttt tacattgttt ttttttttct tgacgctgtc |
| 3901 | ttggaaatct agagtgtatt ttacatttac attacatcta attcagtcta gccacatttc |
| 3961 | acatgctcat ttttttgtgt gtggttttat ggagcagaga gtttaatagg caagaaagaa |
| 4021 | aagagaaggc agaagaaaat ggctcccctg tacagagacg cgggggtggg gcgctccaaa |
| 4081 | gccaaaagag gaggtcccta agtatggtag acaccagcca ggaatatatg cagtgtctgg |
| 4141 | aggaggggat gtctgatttg catagggtca catgctcatt tttatggcta ctgtattggt |
| 4201 | cagtacagat ttagatgggg atttgctctg aacaagttgg tgattgatgg tgttcatatt |
| 4261 | ttaattgaat ttttcctggg ttctgctgta cacttgtatg tgtgttagtt tcatgtgcaa |
| 4321 | tgcttgtgtc acttttaaaa cccagatata tggcataaca tgagaatgaa aaatggacca |
| 4381 | gaaaaatagt ttggcaatgt agtcatgttt gttcctatta aatgttccct attgaccact |
| 4441 | ctatctcttt taattataac aagaatctgc cctgccagca tgcccagtta cgctgggaaa |
| 4501 | acttctgcct catttactct ggctgattct catccactta tgggtcagtg gttcattttc |
| 4561 | tagaggtcac cagcattcat acctagcata caatttcatt cattataatg aaggaatgtt |
| 4621 | ttcccttcaa agagacacaa ctagtgggct taatttttct tgatatgtca cctgtaaaat |
| 4681 | tttaatgatg atgtttaaac tctaaatgta gccatcaaga caaaaactgc aaattttgag |
| 4741 | cctcagtgtg tgtgggtggg tttctgtttc ggtaatttga aacattgcag aatatcatca |
| 4801 | aaatatgata cccaagaatc atatggtatc aatcattcct agatatactg atctattcat |
| 4861 | tgccaagata gttcaatgag ctggcaaaaa catatggaat tattttctta aaatgtgaaa |
| 4921 | aataaaattt aaccaatcat gtatcacagc ttgcaacttt agtcatactt tgaaaagcat |
| 4981 | tttaatttgg acctcatgat tgaaaattta taaaaagctg aacagaaatt agttcacttc |
| 5041 | atattttaga aaagcagagt ttctttacta aatgaggcat ttgacccaaa ttggagagaa |
| 5101 | aatgttgaaa ctacttctgt gagcaagcag gtggcttctc aaacacatgt tgggatgaaa |
| 5161 | tggttgggcc tcagggtctc agtgcctgtc actgagagtt ggcactctct atctccatgg |
| 5221 | tctcctccaa gtgtgactct tgtctcttgc tgacctgacc tgccccaagt gactcactgg |
| 5281 | tcatgaccct gcacaccttg cgtctctcct atcaccctgc cgatggcaga gctacaaagg |
| 5341 | tctttgatgt agctctgtct gatatcctgt gtttccccct atggtctgtg tggaagcagg |
| 5401 | tatgggggtg tgtaaagggg aagcctatga agttcatctg caaagactac ctggttaggg |
| 5461 | gaggagagga agaagctata tgcaccattt caccagcaag catgggctct tctgcctttt |
| 5521 | agcttagggg tcctgttgtc tagtctcact cacctattaa aacagtccag caaatagagg |
| 5581 | ttttgtttac ctcccattaa aaaaaaagca attaatggaa tagaagataa taatgtatga |
| 5641 | gaagcactat tgtgaaagaa aaaccttcaa cttctctcag ccaaataatt gcttcctcct |
| 5701 | ctgtccttcc cagaccttga tgtttgctct attatttcaa aacaactata ttataaatat |
| 5761 | ttgagaatgt gtatttccct gcaaggagat cttaatcccc aagaaggcag gagctgtgta |
| 5821 | ttattcatcc cagtgctcct tcaaaccagg gcctcagaca gtgcatggcc caaagaggta |
| 5881 | cttaataaac gtttggtaaa ctgacactat tgaaattaag caacctggat ttgaggtggg |
| 5941 | tctctgccac tcacaagaga ttacgctttg agaaaattcc atcacttcat tgattttcag |
| 6001 | ttcttgcatc tgtatatggg agacgatact aggtgatttc tgacatctct caccgtttaa |
| 6061 | atgctctgtg atctatacaa cgaggggctc gcbgttctag acaagttcct tccagcttta |
| 6121 | cagttgcata acccttctaa tcttagtcac atgatgactc cactgacaga tttttggcca |
| 6181 | ccatcattag acatgctgag ttacgtgtgc ctttgctctg atcctcaaaa ctcatgattt |
| 6241 | ttaaagtttt ctgaaatatc taccatttat caggatccag atggatttca tgaccaaagt |
| 6301 | ggatgtttct tttctctccc attacaatct tttacttttt gtgtgggaaa ttgcatgtta |
| 6361 | aagaaaggga aattgaagaa tgggatgctt tggaattctg gcaagatgga ttagtgggtt |
| 6421 | ccagaaagta ggggcagcca caaataccga aataaatgag atcgtattat tgagaaagca |
| 6481 | caaatggaag aaggtcaaaa gcaagaagaa gctgacatcc tgcttcctcc aatttttgct |
| 6541 | ttctctgttt ttccaagaaa ctcctcttcc aagccttgct gaaaaactcc actttcctaa |
| 6601 | atctaacttc ttaaactgat aatggcaaga agttaggaat gaccaatatg tttaacactc |
| 6661 | caagagtatt tgttttgttt tgttttgaga ctgggtctca ctctgtcgtc cagcctggag |
| 6721 | tgcagtggtg tgatcacagc tcactgcagc cttgacctct cctgcccaag gaatcctccc |
| 6781 | acctcagcct cctgagtaga agggaccaca ggcatgtgcc actacacctg gctaactttt |
| 6841 | aaaaaatttt tttgtagaga tggggttgcc caggcaggtc tcaaactgct gggctcaagc |
| 6901 | aatcctcctg cattggcctc ccaaagtgct ggaattatgg gcataagcca ctacgcctga |
| 6961 | cctctccaag ggcattcttt acccagaaga ggaacttggc agaacttatc ctccaattgg |
| 7021 | tgaggaatat ggagaaaatg actttaagca aaggaacttc tggttctgcc tacctaatcc |
| 7081 | agaaaaagaa gttttatttc tcccttcccc tagtaactat cttcccatat tcacataaaa |
| 7141 | aagtacagaa tcaacattgt tcaagaatta taattttact tgtaagcaca tgtgcacacg |
| 7201 | cacacccata taccttcctt ccctttaaat catcccacac cctaatagta gtaaaatcat |
| 7261 | tgacccgagc atacctggga gaggaagagg agtctgacag gggcaggttc taagtggcac |
| 7321 | tcctggaact taaccctggt gtatatgaac tttacctatt gaaggatgac tcctcaactg |
| 7381 | ttctcacaat ttgctgctct gctttctttt ctaatttctg aaggtgactc atcttcccca |
| 7441 | aggactttca gacttctcag aagaaaaaaa tattgggtgg gtctctgcca ctggcaaaag |
| 7501 | attagacttt gagaatcata aaagtatatc agtatatact cattaatatt gaattactat |
| 7561 | aattaatatt atgatattga tataatgata gaatgatatt gataaaagca atattcaata |
| 7621 | atgaatatta tttcagctgc ccacttattg ggtgcctcat aggtgccagg cattttgtat |
| 7681 | gtattatcta caacccttac atgggacata ttatgatgct gtttctcttg aagaaatatg |
| 7741 | gaaactggaa acagagaggt caccacaatt ttccaaagtc acatagctaa taggtagcag |
| 7801 | acttgggatt caaattcata tgcatatggt aaatcatgct cttcctctgc tacattttgc |
| 7861 | ccccttagaa tatgaaaaag ggatacaaag agatgaagaa aatatgtaag attatccttc |
| 7921 | aatttcacta tcttttttaa agtttttttt attatacttt aaattctgaa atacatgtgc |
| 7981 | agaacatgca ggtttgttac ataggtatac acgtgccatg atggtttgtt gcacccatca |
| 8041 | acctgtcatc tacattaggt atttttccta atgctatccc tcccctagtc ccccacccac |
| 8101 | cgacaagccc cggtgtgtga tattcccctc cctgtgtcca tgtgttctca ttgttcaact |
| 8161 | cccacttatg agtgagaaca tgcggtgttt ggttttctgt tcctgcgtca gtttgctgag |
| 8221 | aatgatggtt tccagcttca ttcatgttcc tgcaaaaggc atgaactcat tttatggctg |
| 8281 | cataccattc tatggtatac atgtgccaca ttttcttaat ctagtctatc attgatgggc |
| 8341 | atttggctta gttccaagtc cttgctattg tgaacagtgc tgcaataaac atatgtgggc |
| 8401 | atatgtcttt atagtagaat gatttataat cctttgggta tagacccagt aatgggattg |
| 8461 | ctgggtcaaa tggcatttct ggttctaggt ccttcaggaa ttgccacact gtcttccaca |
| 8521 | atagctgaac tagtttacac tcccaccaac agtgtaaaag cgttcctatt tctccacatc |
| 8581 | ctctccaaca tctgttgctt cctgactttt taatgattgc cattctaatt ggagtgagat |
| 8641 | ggtatctcag tgtggttttg attagcattt ctttaatgac aagtgatgat gagctttttt |
| 8701 | tcatgtttgt tggccgtata aatgtcttct tttgagaagt gtccgttcat atcctttgcc |
| 8761 | cactttttaa cggggttttt tcttgtaaat ttgtttaact tccttgtaga ttctggatat |
| 8821 | tagtcctttg tcagatgggt agattgcaaa aattttcttc cattctgcag gttgcccgtt |
| 8881 | cactctgata atagtttctt ttgctgcgca gaagtttttt tagtttaatt agatcccatt |
| 8941 | tgtcaatttt ggcttttgtt gccattgctt ttggtgttta gtcatgaagt ctttgcccac |
| 9001 | gcctatgtcc tgaatggtaa tgcctaggtt ttcttctagg atttttatgg ttttaggtct |
| 9061 | tatgtttaaa tctttaatcc atcttgagtt aatttttgta taaggtataa ggaaggggtc |
| 9121 | cagtttagtt ttctgcatat ggctagccag ttttcccaac accatttatt aaatagggaa |
| 9181 | tcctttcccc gttgcttgtt tttgtcaggt ttgtcaaaga gcagatggtt gtagatgtgt |
| 9241 | ggcattattt ctgaggcctc tgttctgttt cattggtctc tgtatctgtt ttgatacaag |
| 9301 | taccatgctg ttttggttac tgtagacttg tagtataatt tgaagtcagg tagcgtaata |
| 9361 | cctccagttt tgttcttttt gcttaggatt gtcttgacta ttcaggctct tttttggttc |
| 9421 | catatgaaat ttaaagtagt tttttctaat tctgtgaaga aagtcaatgg tagcttgatg |
| 9481 | ggaaaagcat tgaatctata agttactttg ggcagtatgg ccattttcat gatattaatt |
| 9541 | cttcctatcc gtgagcatgg aatgtttttc catttgtttg tgtcctttct tatttccttg |
| 9601 | agcagtagtt tgtagttctc cttgaagagg tccatcacat cccttgtaag ttgtattcct |
| 9661 | aggtattttg ttctctttgt agcaattgtg aatggaagtt cactcataag tttgctctct |
| 9721 | gtttgtctgt tattggtgta taggaatgct tgtgattttt gcacattgat tttgtatcct |
| 9781 | gagactttgc cgaagttgct tatcagctta aggagatttt gggctgagac gacagggttt |
| 9841 | tctaaatata caatcatctc atctgcaaac agagacaatt tgacttcctc tcttcctatt |
| 9901 | tgaatacgct ttatttcttt ctcttgcctg tttgccctgg ccagaacttc caatactgtg |
| 9961 | ttgaatagga gtgttcacca cctattttaa gaatagtatt gaagcctcac aaaagctggt |
| 10021 | tctcatgtaa ccatctgaga atatttggcc ttatgacttg aattcattca ttgccttttt |
| 10081 | atttcacatt ttagtgatcc tgatgtctaa atcttaatct ttgatccttg caaggtaaaa |
| 10141 | tagccaagtc aagcctgttt aataatattg gttgaggaag tcacatgctt atgatcaatc |
| 10201 | tttgggttat gtaattatat taccttaatg ttggcagttt aggtgtaagg cagagatatc |
| 10261 | tgatcacatg tgtggttagc taatttaaga tcactgccaa ctaaaatctt catggtatga |
| 10321 | tcttcaaagt tagctacttt gaccacagca atgatttcac cacagcaatt aacaaaatgg |
| 10381 | cagactcttt cctgaggtgg catgaacagt tttaaaacaa agtcaaggac caaaagaaaa |
| 10441 | gcaggcacat ggcatttgat tcatttcaaa aactagtatt gtattaagag ccaaggggat |
| 10501 | agaattgtag catcaattaa aatcttgttt gaaaaaaaat aaaaacaaac gtccattttt |
| 10561 | atctctcaaa tatattaggg ttttcataaa gttataggtg tatttttaaa aaaacaaaac |
| 10621 | tcatatacat tagactgaaa aatttgcctg tcatctcatc atgcagctaa atgcaattgt |
| 10681 | ctatggcgag atacactctt attagaggta tgatagcact aactaatagc aaactttgta |
| 10741 | cctggtagtc taatttatgc agggttcata tttcgctccc tctcagcatg ctgtaactgt |
| 10801 | ggcaaagcca ttctcaggag ttattacccc aacataatca tacccctgtg gattaggagc |
| 10861 | agttaaatgg gtcctgttat cagagacaca tatgtgccac agccgcbgtc atccctaagc |
| 10921 | caccgtgggt gattaagact cactgatggg actacctctg aataggcttg agtgaggtgg |
| 10981 | atacacttca gctgagagaa attcaggtaa ggggctgaga aaatcagatt ttgaatggtt |
| 11041 | ttatcatacc atcaggtctc cttttaagtg ctggggtcat ggatttcatt caacctgacc |
| 11101 | acatagcctt tggaagcttg gctcaatacc tgagtgtgag attatgggtg atattaaagg |
| 11161 | agatgaatgc attgagctga tgtcagagaa tgtcttttac tggattttca taatgactgg |
| 11221 | ctgcagatgg gctgagggga aagtcagatc aagagcattt ctgtaagaag aaagaaatct |
| 11281 | tccctcttat tctctttcaa gaaaatgaat agctgagcac caagaggcca aatacttttt |
| 11341 | taaaaaacac atccttttat gtagagaagg acaggttgag acgaaaaaca ggacctctga |
| 11401 | aactgtcttt atagctttaa tctaggaaga aattgcggca ccattgctga catcattatc |
| 11461 | agaggctgcc ttagttctga gagcttcaca gatggccttt tctgcatttt acatctggcc |
| 11521 | agatgaaggc aaaaaggttg atgaaaccaa aactattaga tcagtggtcc ataactctgg |
| 11581 | ctgcacttta gaatcatctg gggagtcctt aaaactactg atcctgaggc tccatcccag |
| 11641 | accaattgaa tcaggatctc tgggggtggg acctgagcat tggaatgctt taaaagttcc |
| 11701 | tcagggactc taatgtgcag ccaaggctga gaatgactga ggtggatggt ggccaagaca |
| 11761 | ggtgaggcca agagttagaa gcccttactg ttagggaagg cagaagccac aaggaggagg |
| 11821 | ggagggggaa ggagcagtat ttagcatttc ttccacacag ttggggggtt ttctgatcaa |
| 11881 | aattaggctg ggatctttcg cttccatttt catgaaggtc ttatgctttg tccacagcca |
| 11941 | cctggcctca gggcaatgag caatctgatt gatgaatttt cagtaagaaa ctgagcacac |
| 12001 | ttggctctca gccccagtgg cttcccctgt ttccaaatct gcccaccagt tacaggagcc |
| 12061 | tgctcaccaa ctggttgggt taaagaagtc ggctctgtcc ttggcaggga ggccttcagc |
| 12121 | tgtctggccc tgtctgtgac tgcgtgggtg aagctgccta atttggggaa cttgatggaa |
| 12181 | gatctaagct atgttctcta acagttttat cagaaataaa gttaactttt gacctccatc |
| 12241 | tgcctgtctc ctgtggaagg gctctgctcc ttccaaagag actctcaggg gttctcctta |
| 12301 | gaggtgtgtt atcagtccaa agatcatttt agaccagcca ttacagagga tgtccaagaa |
| 12361 | attgcacaag ggaaatagaa gtaagaatga gagcaatata tcagatagta aggaaagtat |
| 12421 | gtgactggtt tcaaataagt aattaaccat aaatccaaag ttcctgcatt agttatagca |
| 12481 | atagtcatcc acctggtcag gaaaaaaaaa gtaaaagact gagctgcaag atagaaagtt |
| 12541 | tgcctgaatt ccacgtactt caaggactac tatggaggat tccttggtcc caatgcagag |
| 12601 | acatgtactc tgaccaccca tgggccaaat ccctcttacc caccctcagt gattcctcct |
| 12661 | gggacctcac tacattgagt tcttacattc cccactcttt tcgggggaaa tataaccctt |
| 12721 | ctgctcttct catgatgtta aaaatattta gacaattact taaaatttac aacaatcttc |
| 12781 | cacataaatg atctcactta tgtttcttgt gagctctgtg atttatttct attatcatct |
| 12841 | atgctgatag ttaaggaaac tgagatatcg agaccaacat gcatagtaaa tggcaaaacc |
| 12901 | agatgaattt taaactttcc taactccaaa agccacatcc tgcccaaccc gccatgctgc |
| 12961 | cgctcagtta atgcctggct gtttgtctcc ccattggccc ctctacccat tgtgctttga |
| 13021 | tggcacactg tattccaact gcctgagact cctggttaat gccattacgt acagacttag |
| 13081 | gttgaattta ctaggatttt taagatttgt aggataagag atatgactgt tagactggaa |
| 13141 | tcagcaatag ataaaaggtt aacaaagttt cagaataaaa tataatagaa aaccccagca |
| 13201 | gatagaagta aaatgaatgg taagacaact gaaatgaaag ccatacattt agaaatatca |
| 13261 | aataaaacac agattaatgg cagacaataa aggaacatac ttagcagtta gtaaaaacac |
| 13321 | tttttacctt attcttatta ccctccagta accttttttt tttttttttt tgagacaaag |
| 13381 | tctcgcbgtg tcitccaggc tggagggtag tgatgtgatc tcggctcact gcaacttctg |
| 13441 | cctcttgggc tgaagagatt ctcctgcccc agcctcctga gtagcbggga ctataggggc |
| 13501 | ccatcactgc acctggctaa tttttgtatt tttagtagag acggggtttc accatgttgg |
| 13561 | ccaggctggt cttgaactcc tggcctcagg tgatccaccc gcctcagcct cccaaagtgc |
| 13621 | tgagattaca agcgtgagcc accaagcccg gctgtaacct attgaaaata acattacttg |
| 13681 | acatgtgaga caaattattt gtaagttaaa gagtttatgt gccttcaatg ctcccaccct |
| 13741 | tccctcccct aaaaagatta ttgagtgccc atgatgtgcc taagccttct ggtagactct |
| 13801 | gagaatgtga agagagttag aggatacttg ttcaacaacc cagaatctag cagaagtgtt |
| 13861 | ttgaaatgac cagccacttg ggagagctat gctagcatat cattcaggat gggctgggtc |
| 13921 | atgttttaat aacaagtaag tttgaacttt ataggtttga aacaaaaaag atgtgtttct |
| 13981 | tgctcacagt tcatattttt tggagattgg ctggagcttc attccaggat actgccacca |
| 14041 | tctggaatgt tgacagttac cgtaacagag aaagagttgt ggaggcbgtc acactggcaa |
| 14101 | ttaaattcgc tgacctggaa ctgacacatg ccacctccac ttatatttta ttggccaagg |
| 14161 | cttgttacac agccacatct aacttcagag aggtcaagat gagcaaatcc taccacgagc |
| 14221 | tatagatgga tgagtagcac tcattattat cacaattatt ttatttgtta taaaaactcc |
| 14281 | aagaaggaga ggtactctat gtgaggaata ggcataggaa aatcagaggg aagttcttaa |
| 14341 | agatgagcta gatttcacta gatggcattg aagaaacatt ccaagtaaat gaacagcata |
| 14401 | agcaaatgca tgaagaactt attgtggtcc tagtacagac gatgcgtgag agtgtggagg |
| 14461 | agggaaaagg taagactgga gaggaaggca ggaaccagaa caggacagac tgtgttcact |
| 14521 | gtcaggcagt taagtctatc ttgtaggcaa catgaagcct tttaaggaag gcaagcagct |
| 14581 | atgtgacagg acagaagatg gattggaaga aaatcaaaag agaagtgggg accagtcata |
| 14641 | aggctcctcc aatatttggg gatccaaacc aaagcactgg cagagaaata gaaaggaagg |
| 14701 | gaaatatttc caaaatattc aaaacagaaa ccaagagaac ttgatgacag aagatgaacc |
| 14761 | caggtttcta ctgaatggac agttgttaca ttctctgaga taaggaatac agaaggaaaa |
| 14821 | agttgagagg gaatatgaaa ttatttttaa tcatgtttaa tttgatcact tgtggaacat |
| 14881 | caaccagaga tgtccatcag ttacaccaat ttgtaggttt tgagagaggc ctgaggtaga |
| 14941 | ggcagagaag tgggaatcag cagattagcg gcagtagttg gaaccataac tgaagatgag |
| 15001 | atttcccagg gaggggagtt gaacaggaag gtagacaaag gctgagtgca gtggctcata |
| 15061 | cctgtaatcc cagcactttg ggaggctgca gtgggtagat cacaaacaag atcaggagtt |
| 15121 | caagaccagc ctggccaaca tggtgaaacc ccgtctctac taaaaaaaca caaaaattag |
| 15181 | ccgggcgtgg tggcacacac ttgtaatccc agcctcagga ggctgaggca ggagaattgc |
| 15241 | ttgaacccgg gaggcagagg ttgcagtgag ccaagatcgt gccattgcac tccagcctgg |
| 15301 | gcgacagagc gagactccgt ccccaccgac cccctaaaaa agaaagtaga caaagatgtg |
| 15361 | tcctagaaaa cactaatatg aatgggtaga gaggggagac ttgtcaagga gatcgagggg |
| 15421 | agagtcagtg aggtgaaacc ttagaggata gaccttcacc aaggaagtaa cagtcaacag |
| 15481 | gcctaaatgc cacagagatg tcaaatgaga gacactggaa atggttcttt gaatattaca |
| 15541 | gccagaacat cacaggagac catttccaaa gcagtcttga tgaagtggtg gggaagggag |
| 15601 | gtccctgaag gagctaagga gggactggga gatcatgacc cagagataag tgttgcaggt |
| 15661 | ataaaaggga aagactgaga tcaggaaata gccacaggat ccctaaggcc aggcttcggg |
| 15721 | tggggtggtg tgtgtgtgtg tgtgtgtgtg tgtgtgtgtg tataaaatgg gaagaccttg |
| 15781 | agtataattc tgtactaaga agatagagca gtagagagga aaaggctgaa gacagatggg |
| 15841 | agggtaaata gtgaattaga aaggtctgtg caaagatgag aaaggatgag tctgaaagca |
| 15901 | cagggagaag ggccagcctt ggacaggaga aaacatttct ttcactaaga ataaagggaa |
| 15961 | ggttgggtat acaccacaaa gaaggtgtag atgggtggca atggagttct gtcaagttga |
| 16021 | gggcattcca tgatagcctc acctttctct gtgaaatgag agagtttagt ttacaagata |
| 16081 | tttctgagca cttcataagc caggttcata gactgaaaga agtggaggtg gagtgtgata |
| 16141 | ggtccttaag aataggggaa gtttggaata tctgacaagg gacagagagg aaaaaactag |
| 16201 | aaaaggcttt gcagaatgtg ggcccacaga tcagaggcta aggggtcccc atttgtgcag |
| 16261 | gagagtaagg gcagggaggc aaggctcaca gcccaaaata tagagcccct caccaaatga |
| 16321 | ctgcaggagg gcagctttcc tatgagagca tccctatcac tgttttcact ccgagtcatt |
| 16381 | aacttacgac ttactcagct ctgtttcgta atagcagact cgagtaatga gggtatgaca |
| 16441 | gcctctctct gcatgccaag gtatgcagcg tggatttcct ttttcgcttt ctctctcctg |
| 16501 | tggcttaggt gccttctgtt ctgctaccag gatagagaac ccagtgacta gtttcttcta |
| 16561 | gctctctttt tctgactagg tatcttgtca gaaatttctg cttaccagac ttcatggaga |
| 16621 | gggaatcaag ctttgaatca gggttgaaaa agtagagctt aatatatata ttacaaaatg |
| 16681 | ccactcacgt tcttgaggtt accttgtatc tataccacaa ctagcattct tttagaaagc |
| 16741 | accattaccg aagtaatccc tttcctggga attcacccaa aaaggttatt cccacttatc |
| 16801 | ccccatctcc aaaataaaaa agaaaaatgt gtgtgcttag agatgttcct ggaagcatga |
| 16861 | gctgtaatac tgaaccaata gaagacgaac taacagattg cagggcatcc gtttggcaaa |
| 16921 | aaacttatgc agttatctaa atgatagtta tgaagacaat atgtataaca cattatattc |
| 16981 | tgagtgaaaa gaacagaagg tgatttcaaa actgcattgg gataatagta atataggaaa |
| 17041 | tagtgagatg aacaaagatt tcaaaggaac aaaaataaag aaaaattttg ctttttatat |
| 17101 | tggtaggcgt atgggtgaaa ttccaatttt aattttaatt tcatagttat aaaattgttc |
| 17161 | ataaaaaaag gtcccccata gacagttggg ctttgggaca aactaacaga aacagagtag |
| 17221 | gaagaaaatt catcttcctt caatcccctt tctctgctta aaacaaaaca aaaaagagct |
| 17281 | ttgtcatgtt caggtgtgca acgaattctt tttccaaatc tggaacttta catctgctat |
| 17341 | taaacaggag tcagtttcca tgtaacatgt tgacaatccc ccaagtgtgt tggaataatt |
| 17401 | ttttttaatg aggagatttg aaattccatt tcaattgcca acctgcctct ttcaacttct |
| 17461 | aaaaacaaag taaaacaaaa caaaaacaca ctgggtccta tcaccccctc ttgctactac |
| 17521 | tattttatct ccattgccct gaattctttc caaacttctt tccacccagc tttgatttgt |
| 17581 | tttcagtcgg gtttattgag gcataattta cgtacagtaa aattcatcct tcttagattt |
| 17641 | agaggtctat gcattttgac taatgcatat tggcttataa tgactaccac aacaaagata |
| 17701 | tagaacacac ccatcactcc cgggttctcc ctgtcccttt tttggtccat ctcctctcct |
| 17761 | acccccaacc ccttggcaac cactgatctg ttttctgtcc ttatcatttt gctttttcca |
| 17821 | ggatgttgta tataaggaat catgcagcat gcagcctctc gagtctgact tcttccagtt |
| 17881 | agcacagtta tttaagatct atccgagtta ttgtgagtag cagcatcttt tttattgctg |
| 17941 | actagtattt catcacatgg atgggccaca acttgtttat ctgttcacct gtcaatggat |
| 18001 | actaagttgt ttccagtttt tggcaaatat gaataaagta aacatttgca tacagatttt |
| 18061 | tgtgtggaca catgttttca attctcttag gtaaatactg agcaatggga ttgctgggtt |
| 18121 | atatgttaag tctatgttca gttttctaag ttctgaaaca attggatatc tatatgcaaa |
| 18181 | aatacaaaat taaccttgac tcaaacttgt accatacaca aaaaataacc tgaaagagat |
| 18241 | cacaggtgta aatgtaaacc tagaactaaa aacttcaagg agagaaacat agcagaaaat |
| 18301 | atttgtgacc ttgcattagg caaagacttc ttagatttga catttgaaac atgatacata |
| 18361 | aaaaatcttg ataaattgga gttcataaaa ataagaacta ctcttcaaaa gacactgata |
| 18421 | agagaatgaa aatacaagcc acagacagag aaaatatttg tgaatttctt atctgataaa |
| 18481 | gggtttgtat ccagcatgca taaagacttt tcaaaactca ataataaaca atccaataag |
| 18541 | aaatgcacaa aagatacaaa cacatcatcg aaaatgacct atgaaaggca aataagccca |
| 18601 | caaaaaaatt ctcaacatca ttagacactt gggaaatgca aattaaaaca acactgagat |
| 18661 | aaactacata tctattaaat ggctaccact ttaaaaacct gtcaagtgcc agccagaatg |
| 18721 | tggaacaagt aggactctct tacattgcta gtgggaaggt gaatggtaca gccactttgg |
| 18781 | aaaacactcc gcagcttctt atagttacac ataggacctg ggggtagagg atggattgac |
| 18841 | tgtaaagggg caaaacttcc tggtaggggt ggggaaagtt tttagaaggg tgaaattgtt |
| 18901 | ctatatcttg attattgtgg tggttacaca actgtctgca tttgtcaaaa ctcacagaac |
| 18961 | tgtacactaa aaaggtatat ttttatgctc tgctaatttt actttaatct taaaaatagg |
| 19021 | aaggaaaaaa taaaatcaat gccactgtgc gactttgggc aagttacttc acttctctgt |
| 19081 | gccttggtct tttgaaatct atacattaag gataaaataa taccttcctc atactgttag |
| 19141 | aattaaatgt gctaatttat gttttatata tataaagtac ttggccgggt gtggtgactc |
| 19201 | acacctgtaa tcccagcact gtgggaggcc gaggtgggca gatcacttga ggacaggagt |
| 19261 | tcaagactag cctggtcaac atggtgaaac cctgtctcta ctaaaaatac aaaaattagc |
| 19321 | tgggcttggt ggtgcgtgct tgtaatccca gctacttgag tggctgaggt gggaggatca |
| 19381 | cttgaactcc agaggtggag gctgcagtgg gctccaccca ctgcctgggt gacagagcta |
| 19441 | gactccatct cgaagaaaaa ataagtactt gaaacatagc aaatgtttta taattattgg |
| 19501 | cttttttttc ttattgttat tacttgcatt attgcbgttt gaagaagttt ggtgataatg |
| 19561 | gagagaaaag ggcaattagg ggtctgggat ggtttaagta tgaggagacc gagacacatt |
| 19621 | gactcagagt gaagaaatca aagataagag aatgaaagaa agggagggta attctgaacg |
| 19681 | cacagacaaa gttatgttac taacgtggca tcggcbgtgt gttgtaataa ataactccct |
| 19741 | ttcacttgtc aatagctaat caaatacttt ctggagacca gaagtgactt gctggatcaa |
| 19801 | tgacaactcc tccacagatc aaaatgttca aatccttttt ctgtgttgta atcctaaatc |
| 19861 | taaaagaaca gagagaccaa gcaaatctac ctcccaacat cattaaagtg acaactctca |
| 19921 | gtatttattt gaatggtctg ctctcagctt caaccaagga aaagtcaaat tagtgttggt |
| 19981 | cagaaaacag aagggtgtta cgagagttct ggctggtcat tacagacttg gggatttttg |
| 20041 | attaaaagaa gaagaagaag aagaaacctg ataaagtgta aatatagcaa gcagggatta |
| 20101 | gtgtcctgct gggtcatgtt ctcacaacag tgagaatttc agagatttca taagaattaa |
| 20161 | actgctccac atgacaattt attttacctt ctggcttttc caggaggcaa atcagtgcaa |
| 20221 | cttctttctg cctttgtttc aatttggtaa caaccctcaa ttttaggaca ggctaaacct |
| 20281 | agccacccta tcagagatga tgaagtagcc atctttttaa caggtgggga gatgaatgga |
| 20341 | atcagggttt gtttgtttgt ttgtttaata actgctagta aaaaccaagt caatagctga |
| 20401 | ctgagtgtaa gggaggctcc agaaggcagg ttattgtagt atagatgtga ctcgacttat |
| 20461 | gatgatgtta cttcccgata aacccgtcat aagttgaaat atcgttaaat tgaaaatgct |
| 20521 | tttaatacac cgaatctacc gaacatcata gcttagctca gcctacgtta aatgtgctca |
| 20581 | ggacgcacat tgcctacagc tgagccaaat cacctggcaa cacaggacac tgtagagtat |
| 20641 | cggttgctgg cccttgtgat gctgtgactg actgggagct gcgcttagtg cctctaccca |
| 20701 | gcattgagag tttcttatcg cttattacta gcctgggaaa agaccaaaat tcaaaactca |
| 20761 | aagtgcggtt tctaccgaat gcttataact ttcagaccat catgatgttg aaaaatcgaa |
| 20821 | ccatcgtagg ttgggatcca tcctataaga cgagctacac tgccggaagt gtaagactgc |
| 20881 | tatgctgccg gaagatgggg catagtggac aactgcaagt cctgacaaca ggaggtcagc |
| 20941 | atctgcgacc tttaacatcc acattgacac taccacagtc ttccaaacag agctgatgat |
| 21001 | atagtttgga tgtcgtccct gcccaaatct catgtcgaat cgtaatcccc agtgttggag |
| 21061 | gtggggcctg gtgggaggtg attgggtcat gggggcagag ttcttatgaa tggtttagca |
| 21121 | cggtcccccc ttggtactgt atagtgagtg agttctcatg cgatctggtt gtttaaaagt |
| 21181 | gtgtggcacc tcccctctct ctctttctcc tactctggcc atgtgaagtg ttggctcccg |
| 21241 | ctttgccttc caccatgatt gttaaattcc cagaggtctc cctagaagct aatgctgcca |
| 21301 | cgtacagcct ggagaactgt gagccaatta aacctcatct ctttttaaat tacccagtct |
| 21361 | caggccgggc gcggtgactg acacctgtaa tctcagcact ttgggaggct caggcaggaa |
| 21421 | gatgatttga ggtcaggagt tcgagaccag cctggccaac atggtgaaac cccatctcta |
| 21481 | ctgaaaatat aaaaattagc caggcatggt ggcgggtgcc tgtaatccca gctacttggg |
| 21541 | aggctgaggc aggagaatcg cttgaacctg ggagtcagag gttgcagaga gccaaaatgg |
| 21601 | agccactgta ctccagcctg ggcaatggag tgagaccctg tctcaaaaaa tatatatata |
| 21661 | ttacccagac tcaggtattt ctttacctga gactatgaga gaatggacta atatagctga |
| 21721 | agaattttat tttattttta aaaaactttt acgtttgggg gtacctgtaa aagtctgtta |
| 21781 | cataggtaaa ctcctgtcat gaggatttgt tgtacagatt ctttcctgct cctccccctc |
| 21841 | ctcccaccct ccatcctcaa gaagatccca gtgtctgttg tttccttctt tgtgttcgta |
| 21901 | agttctcatc atgtagctcc cacgtataag tgagaacatg cagtatttgg ttttctgtcc |
| 21961 | ctgtgttagt ttgctaagga tgatagcctc caactccatc tatcttcctg caaaagacat |
| 22021 | gatctcattc atttttattg ctgcatagta ttccatggtg tatatgtacc acattttctt |
| 22081 | tatccagtct gtcattgatg ggcatttagg ttgattctgt gtcttcagaa ttgtgaatag |
| 22141 | tgctgcaacg aacattcgtg tgcttgtgtc tttatagtag aatgatttct attcttctgg |
| 22201 | tagtaatggg attgcbgggt caaatggtcg ttctgctttt agctctttgc agaatcacca |
| 22261 | tactgctttc cacagtggtt gaactaattt acactcccac taacagtgta taagtgttcc |
| 22321 | cttttctctg caaccttgcc agcctctgtt atcttttgac tttttaataa aaaccattct |
| 22381 | aattagtgtg atggtatttc attgttgttt tgatttgcat ttctctaatg atcagtgatg |
| 22441 | ttgagctttt tttcatgttc gttggctgca ggtacatctt cttttgaaaa gtgtctgctc |
| 22501 | atgtcctttg cccacttttt aatggggttg tttttctctt gtaaatttaa gttcctcata |
| 22561 | gatgcbgggt attagacctt tgtcagatgt atagcttgca aatattttct cccattctgt |
| 22621 | aggttgtctg cttactcttt tgattgtttc ttttaccatg cagaagctcc taagtttaat |
| 22681 | tagatcccat ttgtcaattt ttgcttttgt tgcaattgct tttggtgtct ttgtcatgaa |
| 22741 | atctttgcca ggtcctatgt ccagaatgat attgcctagg ttgtcttcta gggtttttat |
| 22801 | agttttgggt tttacattta aatctttaat ccatcttgag ttgatttttg tgtttggtgt |
| 22861 | aaggaagggg tccagtttca atattctgca tatggctagc cagttatccc agcattattt |
| 22921 | attgagtaag gagtatctcc tccgttgctt gtttttccca ggtttgttga agatcagatg |
| 22981 | gttgtaggtg tgtggcctta ttttggggct ctctatcctg ttcatttggt ctatgtgcct |
| 23041 | gtttttgtac cagtaccatt ctgttttggt tactgtagcc ctatagcata tttcaaagtt |
| 23101 | gggtaacatg atgcctccag ctttattctt tttgcttaga attaccttgg ccatttgggc |
| 23161 | tctttttggt accatatgaa gtttaaaata gttttttttc tagttatgtg aagaatgtcg |
| 23221 | ttggtaattt gataggaata acatgtaatg atattgattc ttcctatcca tgagcatggg |
| 23281 | atgtttttcc atttgtttgt gtcttctctg atttcttcaa gcagtgtttt gtaactcata |
| 23341 | ttgtagagat tattcacctc cttgcttagc tgtattccta ggtattgtat tctttctgta |
| 23401 | gtaattgtga atgggattgc ttttctgatt tggccctcag cttggtattg ttggtgtata |
| 23461 | ggaatgctag tgattttttg tatcctgaga ctttgctgaa gttatttatc agctgaagga |
| 23521 | gcttttgggc tgagactagg gggtttttta gatatagaat catgttctct gcaaacagat |
| 23581 | ttagtttgac ttcctctctt cctacttgga tgccctttat ttctttctct tgcctgattt |
| 23641 | ccctggccag gacttccagt accatgttga ataggcgtgg tgagagaggg cattcttgtc |
| 23701 | ttgtgccagt tttcagggag aatgcttcca ccttttgccc attcagtacg atgtttgtgg |
| 23761 | tggtttgtca tatatggcta ttattatttt gaggtgtgtt cctttaatac ctagtttatt |
| 23821 | gacagttttt aacatgaagc agtgtttaat tttattaaaa gtcttttctg cctctgttga |
| 23881 | gatagtcatg tggcttttgt ctttagttct gtttatgtga tgaatcacat ttgttgattt |
| 23941 | ccttatgttg gaccaacctt gcatcccagg gatgaagcct acttgattgt ggtggtttag |
| 24001 | ctttttgata tactactgga ttcagtttgc aagtattttg ttgaggattt ttgcattgat |
| 24061 | gttcatcacg gatatcggcc tgaagtttct ttttttgttg tgtctctgtc aggttttggt |
| 24121 | atcagaatga tgctggcctc ctagaatgag ttggggagga gttcctcctc ctcaattttt |
| 24181 | ttggaatagg ttctgtagga atggtaccag ctcttcttta tacatctggt agagtttggc |
| 24241 | tgtgaagcca tcaggtcctg ggatttttta gttggtaggg tatttattac tgattcccta |
| 24301 | aatagaccga taatgatttt agaagtggag tcggtttttt cctggtccag tcttgggaag |
| 24361 | gtgtatgtat ccaggaattt atttagctct tctaggtttt ctagtttgtg tgcatatggg |
| 24421 | tgttcatagt agtttctgat ggttgttttt atttccgtgg gatcagtggt aacattctct |
| 24481 | tcatcatttc tttttttttt tttttttttt ttttttgaga cggagtctcg ctctgtcgcc |
| 24541 | caggctggag tgcagtggcg cgatctcggc tcactgcaag ctccgcctcc cgggttcacg |
| 24601 | ccattctcct gcctcagcct cccgagtagc tgggactaca ggcgcccgct accacgtccg |
| 24661 | gctaattttt tgtattttta gtagagacgg ggtttcaccg tgttagccag gatggtctcg |
| 24721 | atctcctgac ctcgtgatcc gcccgcctcg gcctcccaaa gtgctgggat tacaggcgtg |
| 24781 | agccaccgcg cccggcccat ttctaattgt gtttatttga atcctctctc ttctcttctt |
| 24841 | tattaggcta gctagtggcc tatctatctt attaattttt tcaaaaaacc agctcctgga |
| 24901 | tttcttgatc ttttgaatgg tttttcatgt atcaatcctt cagttcagct ctgattttgg |
| 24961 | ttatttcttg tcttgtgcta gctttggggt tgacttgttc ttgcttctct aattctttca |
| 25021 | gttctgatgt tagtttgtta gtttgagatc taactttttg atgtggacat ttagtgctat |
| 25081 | aaatttaact cttaacactg ccttagctgt gtcccagaga gtctggtatg ttgtatcttt |
| 25141 | gttctcatta gtttgaaaaa acttcttgat ttctgtctta atttaattat ttatccaaag |
| 25201 | tcattcagga acatgttgtt taatttccat gtaattgcat ggttttgagc gattttctta |
| 25261 | gtcttgactt ctatttttat tgtaccgtgg tctgagggtg tttgatatga ctttggttct |
| 25321 | tttgcatttg ctgaggattg ttttatgtcc aattatgtgg ttgattttag agtatgtgcc |
| 25381 | atgtggtgat gagaagaatg tatattctgt tggttttggg tacagagttc tgtagaggtc |
| 25441 | tattagatcc atttggtcca atgttgagtt cagatcctga atatctttgc taatttcctg |
| 25501 | cctccatgat ctaatactgt cagtaaagca ctgaagtctc ctactactat tgtgtgggag |
| 25561 | tctatgtctc tttataggtc tctaagaact tgctttatga atctgggtgc ttctgtgttg |
| 25621 | gatgcatata tatttaggat agttagatct tcttgttgaa ttgaaccctt taccattatg |
| 25681 | taacgccctt ctttgtcttt ttttttcttt gttggtttga agtcttcttt gtctgaaatt |
| 25741 | aggattgcaa cccctgcttt tttctgtttt ctgtttgctt ggtagatttt cctccatccc |
| 25801 | tttattttgg acctatgggt gtccttacat attttatctt tatctatcca tccagccatc |
| 25861 | cagccatcca ttcatccgta tcatttttaa ccaataagga cttttaaaag cgcaaccaca |
| 25921 | acaccattaa cataaccaat aaaatctata acaatgataa aatatcatct aatactcagt |
| 25981 | ccatgtccaa ttttccctcg ctatctcaaa atcgtcttct tagaaatggt ctgttcaaat |
| 26041 | gagatcacat ggacagagga aggcgaacct cacactgtgg ggactgttgt ggggtggggg |
| 26101 | gaggggggag ggatagcatt gggagatata cctaatgcta gatgacaagt tagtgggtgc |
| 26161 | agcgcaccag catggcacat gtatatgtat gtaactaacc tgcacaatgt gcacatgtac |
| 26221 | cctaaaactt aaagtataat aataaaaaat aaaaataaaa aaataaaaag tgaaaaaaga |
| 26281 | aaaaaaaaaa aaaaagaaat ggtctgttca aatcacaaac cagattcaga aacaatagcc |
| 26341 | atacattaca ttttattaat atgtctctta aatttctttt aatctattac agtctttgga |
| 26401 | atttttatgt cttcgtttat ccttccaatt attaaaaaaa aagtattttt gtattcattg |
| 26461 | aatagacaat gcttgcagaa aagtaaaaaa aaaaaaattt agtacaaaaa ggtacatagt |
| 26521 | gagcbgttcc ttagtctccc ttcccagaag caatgttacc acttttgtac aaatagtctc |
| 26581 | tgcctagaca cacatgccag tccctaaggt ggctgtaaca aggtggttaa gagtgagaac |
| 26641 | atgaattcaa attcctatta tgccactcac taagtataaa tcttggtcat ggtacatgcc |
| 26701 | tctgtgcctc agtttttaat aatggtacct acctcatagg gctgttgaga gaattaaatc |
| 26761 | agataagtgc ttaaataact attaatattt attattattc acattccctt ttggcttttt |
| 26821 | tcccaaatag cagagtggtg cacatatgtc ttcatttatt tggcttgttt tttcacctca |
| 26881 | catcacattt tgatgaataa ttccatacat gttgttatag atttgcttca ttctttgtaa |
| 26941 | tcattgacta atattccatt gtatgaatat gctactgcta aacatgtacg ttatttccaa |
| 27001 | cctcttatta tcaagaaatg ctgcaatgaa tatccttgta atactttagt ggattcatgt |
| 27061 | gcaaaaatat tcataggata aaatcctgaa agttaaattg ctgagctaaa gggtatgtgc |
| 27121 | attttaatgc tttatagatt gcccagctgc ctcaaaggag gttataacaa tttacactcc |
| 27181 | caagaaaaat gcacaagggt ccccatttcc ccatacccta gctaacacag gatattgcta |
| 27241 | aatgctttca tctttgtaaa catgatgtat tgaaaatggt atctcaaagt tttaatgtgc |
| 27301 | atttttctga ttgtgagaag ataaaggaaa tgtagtacaa ctaaacatca gcagtcaaat |
| 27361 | gacctggcca tgactcctga gtgaggacac tggtaaacac catcaggatc caaacacctc |
| 27421 | tgtatttacg aagaggatgc tccctattgg atagcactaa gcttatttca tgtatgtaca |
| 27481 | tatgtagtta gttaattaca tccagcggtg gcaaagggct tgttctgacc caatgaaact |
| 27541 | ttctctcctg gcccccttcc agcatgtggt caggagtaga gtgttgtggc catgaggcat |
| 27601 | gcatttgtac agatgactac ttactcctcc ttgaaacatt tttttccatt tgcttccctg |
| 27661 | ctgtctcact catgggtctg ctcctaattc acaaatcact cttttcccag tcttcttggt |
| 27721 | tgggttttct cctcttctgt gcttgtagac atgggggagc cccagggctt ctctcttgaa |
| 27781 | ctacagcttc tccctgggtt catctccttg ggatgtctgt tccaatgggt ttaaatacta |
| 27841 | gggctaggac tagggagagg tcattgaggc acttagcaca taaagtttaa ggaaacattc |
| 27901 | tttatcaggc ccatgcaagt gcaggactgg ccctggaggg tgactaccac cttacctttt |
| 27961 | ccaccctagg caccttgttt gccttaccct agccccagtc ctctttaaca ccccagtctt |
| 28021 | ctccctggac ctccagaaac ataaatccta tttgacattt ctacttggag gttttaaggt |
| 28081 | aactcaaacg taaaatatct aagacagaac tcttgcatca cttcccatcc tggggcccaa |
| 28141 | gcctgtctct tctactagtc tatctcagtt aacagcatca ccatttattc agttgctcag |
| 28201 | gacaaaaaat ttgaagtaat ccttgactct tctttttttt tttttgagac ggattctcac |
| 28261 | tctgttgccc aggctggagt gcagtggtgg gaccttggct cactgcaacc tctgcctcct |
| 28321 | gggttcaagc aattctcctg cctcagtctt ctgacctcgt gatccactcg cctcggcctc |
| 28381 | ccaaagtgct gggattacag gcgtgagcca ccgcacccgg cctggattct tttttttttt |
| 28441 | tttaaacaag tcctatcttc catctccaaa atgtatccca aatctgacaa cctctcccac |
| 28501 | cgtaggccag cccccatctc tcccctctga aaatagcctc ccttagatct ctggacattt |
| 28561 | gttcttcccc acccccttgt gatcactatt cagcattcag aatgatcttt taatattatg |
| 28621 | aaggagactg tgttcctctc ctacttaaaa ttctctagtg gcttcctaat aaatttagaa |
| 28681 | taaaaagcca actcctcgcc atggtcacca ggccaggatc cagtgggtac aacaatctgt |
| 28741 | tcccagcaca ataatcccac ttctgcctcc ccaccattca ccaggctcca ctgcactggc |
| 28801 | tcattcctgc ctcagttgtg cttcttttcc ctggaaagtt ctttctgtag atctttaaag |
| 28861 | ggtgatttcc ttctcaacat tcaggtgtca gctcgtttca ctttcctgac catgcccatc |
| 28921 | cactcagaga tcactcaaaa tcccattacc ctattttatt tctccatcat atgtatcact |
| 28981 | atctgaaact atcttgttgt tgatgcaggc tattttcttg accccttcat gggactccca |
| 29041 | acaggggtac cccatttact cagcctgccc tgctcaacct cttgcaggag ggagcacacg |
| 29101 | agtgaacgag tgcaggaacc agctggctgc tttagtgctg tgaggagtaa actccatgca |
| 29161 | ggccctgcag cagcaaccag gtaggggtgc ctgcaacccc agggccccag agggtgtgtt |
| 29221 | acaatgctct cgtagctctg ccatctgtgg acagcagtgt gttgtcagct cagtgggccc |
| 29281 | tttgcttcat catgtagggt ggctgccctc tgcctgtgag ggcaaagggc cagggtgaca |
| 29341 | gtctttttgg gtacccacaa tttgtgcatc ctgaattctt gtttggtgcc caagaagaat |
| 29401 | ggggtcacac agatgaactg aaggatggtg aatgcagaga attagcaatg aaagtggctc |
| 29461 | tcagcagaga gagaagctga aaagggaatg ggaagggcag gtcactctcc cctgaagtca |
| 29521 | agtcacatct ctccaatgtc cagccaccat ctctgaagtc aagtttcctc tctctgatgt |
| 29581 | ccagccactt ctcctctcta ctggctgagt ctggggtatt tataggcaga ggataggtgg |
| 29641 | tggggcaggc catacataat tttggaaaag gcaacattct attggtaaaa agacattatt |
| 29701 | cataaagaac caattgggaa agagcgggca cacagggatg gaagttctca ctttgggctg |
| 29761 | caggtttcag gcttttcagc tcaaaagtga ggtttttcca gggacctgcc ccgtctgcct |
| 29821 | aaaatttcta cacttctgtc attgataccg ctggataaca gctctcctat aaagttcagg |
| 29881 | ggcttaaaac aaaaatttac taattcaccc ggacagttct tgatagggtc tctcctaact |
| 29941 | gttgcagtta catagcaact gggttggagt catcttttct gggcttgaca tccaggacag |
| 30001 | cttcttccct tgtgtgtctg gtgcctcagt gctcctccag gcagcctttc tctccagaag |
| 30061 | agtagcctgg acttcttggc aactcaagct tccaaaagaa aaaaaagcag agactgctgg |
| 30121 | ttctcttatc aaacaggcct ggaactggca caatgtactt ctgctgccat attcaggagg |
| 30181 | tcaaagcaat cgaaggccaa tccaagttca aaggcattgg agaaaaatga gaagtgtcac |
| 30241 | ttaaatgaga agtgacacat gcgtaaaagg gggaaaagca ttgattgtgg ccatttttgg |
| 30301 | agataagcta tcacgtttat ttgtttgttt gctttctaat ggtctgtctt ctcccattag |
| 30361 | gttataagct ctgtgagaca acaggaatct tgtccatctt gttttatggc tctacttcca |
| 30421 | acacctagaa taatgcctgg cacatagtag gtgctcagtg aataacttaa gcacttgata |
| 30481 | catgtttggg gaactaaaat gaacagaatt aaacttcccc agattggtcc tgccagattt |
| 30541 | gctgatgcca agcatgctga tgcctcacca gatgaaagaa gccctaaaat gtagggtttc |
| 30601 | gctttctctg caaacaagaa aaacttgccc tgaacacaaa atctagaaat agatttggcg |
| 30661 | tgttttctac attgaaatat ttcccgtagt accagaaatt attttcccac agctttgtgc |
| 30721 | tacattaaaa tattgaagtt gactgaaaat atctccattc tttaatcttg gtgtagacta |
| 30781 | gaaacaattt ttttgtaaca aagtaaatat gaaaacttcc taatatttga actccccaga |
| 30841 | tatccccaga tatctccaaa cttaaaatat cattgcaagt taagataaat ttttttaaat |
| 30901 | gactaccgag aaaggtcatt aaaggcttgg ttattaaaat gtacagattt gggttataaa |
| 30961 | gccagaactt atttgtttaa atcattacat atgaccaagc acagaaaata aattacctca |
| 31021 | aatctcctct ttgctaattt ttactggtaa actctataaa atgatcctat ctttaaacct |
| 31081 | ttttgtaaac cccttataag ttagtaagtg agaatgtatt catcagaagg attttagtga |
| 31141 | tgtttgaaat taaaaaagag agatttgatt tttaaaatta tacttgcaga ctactgctaa |
| 31201 | tgaaacttct tctaacccta gttttgtctt atcttcagtt tttccagatt tgctcaaagc |
| 31261 | aatcccagtg agcatccacg tcaatgtcat tctcttctct gccatcctta ttgtgttaac |
| 31321 | catggtgggg acagccttct tcatgtacaa tgcttttgga aaaccttttg aaactctgca |
| 31381 | tggtccccta gggctgtacc ttttgagctt catttcaggt aagtacaaaa ttctacctct |
| 31441 | gaagacaaat gtgcttttca atatgtcaaa aagaccgtct acctaaatat aaagttataa |
| 31501 | tcttaacata tatacatgga tgcacactgt agtattatac ataataacaa aaagtgtgga |
| 31561 | aataccacac ttgctcaaca gtagggaatt caataaatac tttatggaca tctatatgaa |
| 31621 | taactgtgat gctgacatta aattatattt ttgaagatgt aatcaagagg ataaacgctt |
| 31681 | gtctcaaaaa gttacatggg aaaagcagta tgtaaactta tataaacatt gtgaacctaa |
| 31741 | tttgattata tatataaaat atagggaata tacatataaa atacatatat gtatatatgg |
| 31801 | gggctatata tatatatata tgaaagagat agatagatag atagatagat agatagatag |
| 31861 | acagacagac agacaataca gactccaatc tgttggtcgt ggttgtctct gacccatgac |
| 31921 | actatggggg acttttattt ttgctcatac ttttcaatat ttcttagtgt tcaataatgt |
| 31981 | gctattattt atacataata ataaaaataa ataaatggca tcaaaaaaga gtaaagggcc |
| 32041 | agtgttccgc ccacatatga gcagccatat tcaagcctgt agacactttg tgtagcctaa |
| 32101 | tgctaggtgt atctgggcaa ggataaactc taaagccaga aattagttca tcaataaaca |
| 32161 | tgtgctactc aatagctagg gctgatggaa aagaatataa aacccagtct gtgccaaatg |
| 32221 | gtgcttacta tctgcaagtg ggagaaggag aaagacgaga aaatgaaaaa tgtgtgtata |
| 32281 | atttatatgt agcbgttctg taggagatct ctgacttcac cccattctaa ctttgcaaaa |
| 32341 | agatccaaca ctttgtcaga ttcctgggag gcaagtaatt ttattgatgg tttcatggag |
| 32401 | ggatacagaa cgataacaac tcacacaaag caaacaatgt aatgaaaatc tctattcgac |
| 32461 | tgtttctttt tctcctgaag ttgccctttg gctgccagct accaggcacc aggctcaagg |
| 32521 | tactttcttg ctcttgacac tactcccttc tctcatacaa ttcaacccca accacaaacg |
| 32581 | tgtatagatc tctctctcta taaaacaaag gcctgtagtt aacaggaggt cacttgcagt |
| 32641 | gtagcctctg ttcattgtta cttgtgcaca ctgcttaggg tctcacccca tccacattct |
| 32701 | gctaatcaca ttattcaccc atccaatgta gatctctcca gtggagattc tgctaatatt |
| 32761 | ttctttagat ttgtcacaag tatataatac agttttaaat tgtacagatg attatcctat |
| 32821 | aacagaagag tctaagcctt ttacatcttt gtatctctaa cgaaagcatt cagcatgaag |
| 32881 | ctctgtacac agcagacaat tcaatatgaa tttgctgact tgaaacagca agcctagaaa |
| 32941 | ggagatgtta acttggtcac ttagacagaa caggtttcag caatcagaat tcagatgaca |
| 33001 | tggaactggt agaacaggcg ctttgaagca ataggacatg agccagtgag gagagggatg |
| 33061 | gaatatcata aacaaaggcc aagggctttg caatcagagc tgaagagcca agagcacagg |
| 33121 | ctcagggtgt gggcagactg aatgagaaag tgattcaatc acatgtgaaa gtccagatga |
| 33181 | gaagagagag ttgggattac ttctgctcac caaacatcca aaaccaaaca ggtggatccg |
| 33241 | ggtggtgtgc tgttttactg atgaccatta cacagaattt taacagaagg aatgtaaagc |
| 33301 | agtggttctc aaactggagt tcccagatga gcagcgtctg catcatctgg aaacctgata |
| 33361 | aagcagcaaa ttctcaggcc ctaccccaga cccactgaat cagaaacttg ggggtctggg |
| 33421 | ggaagatggc catctgtatt ttaacaatct cccttcagga gattctgagg ctggctcaag |
| 33481 | tttgaactac aggtagttgg ttcaacaggt gttggtggac tgacaaacaa aaagagactc |
| 33541 | cgaggtaact ccaagatggt aatgtcagaa agcagctacc acccctaggg cttgggggaa |
| 33601 | ccaacaaaag agtttggcat tgccagaacc tagaatcttg aggagaggcc ccagagcatt |
| 33661 | gtgtctcaga ccttgaggac ttggcactgg gacaccatga ggggtttctg ggtgtgggaa |
| 33721 | agggctggaa actccccagt tgctgccacc agggagaact acaagtgaag tggaaggtgt |
| 33781 | gggcctttct cccttttctt ttctcgtctt ctctctcccc ctggtgctca tgtttgacag |
| 33841 | aaaacagctg aaaaggcaga actagtttgg ggagtcttga cctggcatca taaagcagag |
| 33901 | aaaagcaaag ctggagtgaa ggtgagacac aacagctcat tagcagcaac agccgtctag |
| 33961 | cgctccagct tctgaatgaa attctgaaga acagcgcact tggaagacaa attatttgac |
| 34021 | agttctgaca gacgaccaaa ctaacagcat ttgaaaagca agatgactca gagaatacag |
| 34081 | aatttaatcc aaatcccaga tcctatctct gcctttggcc aggcctaatg caaggagaac |
| 34141 | ctgagcacac aaatatatgc aggaatgatc aggacctgtg cctgcattct attctgtctc |
| 34201 | acccaccttc aaatttgttg taaaaacatg ggctcaataa aggtttgtga atcagggaag |
| 34261 | gaagagaagg ggagaaagga agggaaggag ccagctccag atctgtgtct tgcagaggat |
| 34321 | aaaggccagt gtttttagat cacccagtgt ttttctaagc ccccaatact tattttgaaa |
| 34381 | tatcaaaatg ttcaataact aaaaaaaaaa ccgttacaac aataaaacat gtttgagggt |
| 34441 | cagatggact ggcagtttgt gacctctggg gataaacagg tcactttgga atcacagact |
| 34501 | tcctcattcc ccttaaatct catatggtac ccagaagccc ttggaacttt ggaaggtgtt |
| 34561 | tattcacagt tgtaatgtcc atgcagaccc tggctctaag acccaattgt gtaagggtag |
| 34621 | gtttgtagcc cttatcccaa acattctaag tgtgagccaa tgcgtcacac actcagaggc |
| 34681 | cagagactgt attggggtcc tttatttcac gtacgagtca cattccatta agagacccca |
| 34741 | gaagtcagct ctcttccact gactggttct cttcccttgt ttctcttgcc aatgtgtgct |
| 34801 | gcccaggtgg cagtgctcac tgtcagcaga gaagaaaaat gctttcctcc ttggacctct |
| 34861 | tttctctttt tctcctccct actcacattc aggttcccta agcttccccg ctccttgtgc |
| 34921 | tgaagtcatt ctatggtcat ttcttcaact gtctacttcc ctgctggatg ggcacccaag |
| 34981 | acttggcatc ctggggcatg tagaaagggg aaagggaagg gaagggaaaa gaagtcctcc |
| 35041 | caattgtcta tctggacctt tccacactgc ccagagtact gctatgggca tctccttatg |
| 35101 | tctcccgatg tggtgcatgc cagaccctgc aggtagaaaa ggaaagaaag caacccattg |
| 35161 | gaccaggcca gcaaaggctt cagtcacaca gctggctcat acttatggct tcatattctg |
| 35221 | ttgcctcttg aaccagacat ttcttccact ctcataacct ccagtttagc tcgtattcct |
| 35281 | cagcattctc catgtaatat tgttgcatga aacccatgca agtcagccaa tttgctcttt |
| 35341 | ctcatcttgt catttataaa ttgatgctga gaagtctttt tcccaaggtt tttagtaata |
| 35401 | ccttcatcat cccccatagt tcattttggg cagtgattcg cttctttgac tgtacattag |
| 35461 | aatcatctga agaactttct aaaactactg atctcaggtc tcacacaaca ctaattaaat |
| 35521 | tatagtctct ggtggggtag ggcttgggca ctgctatttt accttaagct ctctggagtc |
| 35581 | attctaattt gtagccagtg ctaagggttg caatataagt gaatatattt cacgtatttg |
| 35641 | tcaaacattg actgagtgcc cattatgtgc cagccattat aataggcact ggtgatccca |
| 35701 | cagtgaatca ggcacacaat gctgtcttca cggagcttgt tgtctagtgg gagagtcaaa |
| 35761 | caaaagtgta tatcaataat taagtgatta cagattgcaa taattacaat aagggtgata |
| 35821 | aacaggttgc tataatatac aatagtattg cctttcacca gacatttctt aaagaggtaa |
| 35881 | atcatctatc agacaccttt taaaaatctc atctaatttc aaaagtgtac ataaataatt |
| 35941 | aagtgattac agtttgcaat aattacaatg agggtgataa acaagttgct atgaaagaga |
| 36001 | aagatagcag agatctggct ttgagatggt ggtcagggaa gactgctcca atagctgagt |
| 36061 | tctaaagcta agaaggaact gagaaccttc acagaacgtc ccaagtagaa gagaaagcac |
| 36121 | actgaagact ctagggaaag aggtctgctt gttgtaggaa ccgaaagaag gccaatgtgg |
| 36181 | ctaggtgctg ggtagtgagg ggaaatggca caaggaaaaa atgaggttag agagatcagt |
| 36241 | tgataccagt taatgttgga ccctaaacat taaccatggt aagtctttta gaattgattc |
| 36301 | taattgcaat gaaaaccttt tgaaagattt taaaaagata tctgatagct gatttacctc |
| 36361 | tctaagaaat gtctggtgaa agacaatacc atcacattgg agatggaaaa agatgaatgg |
| 36421 | attctaaaaa cattctgaaa gtacattcaa aatgtttttc aggtagctta tgcaactaat |
| 36481 | aaatagtggt ggcattctgg gtaagacaag ggaggagcag gcttgcagtt tagggcaaga |
| 36541 | aaggggtggg gagaagagct cagcactaaa atcatgtgtt ccatttgggg cacatcgagt |
| 36601 | ctgagttgct atgagaccac caagtggaga tgccaagtaa atagtcagtt acatgaatct |
| 36661 | ggagttcagt gaagaggtct agaagaaaga tgtatatttg ggcattattc ggatatagat |
| 36721 | attatgtaaa gcaataaaat tggatgagat cacctaggga gagaatgcac atagataaaa |
| 36781 | actgacctag gaccacttca tgtctaaaac accaaaagca atgtcaacaa aagccaaaat |
| 36841 | tgacaaatgg gatctaatta aactaaagag cttctgcaca gcaaaagaat cagagtgaac |
| 36901 | aggcaaccca caaaatggaa gaaaattttc acaacctact catctgacaa agggctaata |
| 36961 | tccagaatct acagtgaact caaacaaatt tacaagaaaa aaacaaacaa ccccatcaaa |
| 37021 | aagtgggtga aggacatgaa cagacacttc tcaaaagaag acatttatgc agccaaaaaa |
| 37081 | cacatgaaaa aatgctcacc atcactggcc atcagagaaa tgcaaatcaa aaccacaatg |
| 37141 | agataccatc tcacaccagt tcaaatggca atcattaaaa agtcaggaaa caacaggtgc |
| 37201 | tggagaggat ctggagaaat aggaacactt ttacactgtt ggtgggacta taaactagtt |
| 37261 | caaccattgg ggaagtcatt gtggcgattc ctcagggatc tagaactaga aataccattt |
| 37321 | gacccagcca tcccattact gggtatatac ccaaaggact ataaatcatg ctgctataaa |
| 37381 | gacacatgca catgtatgtt tattgcggca ctattcacaa tagcaaagac ttggaaccaa |
| 37441 | cctaaatgtc caacaatgat agactggatt aagaaaatgt ggcacatata caccatggaa |
| 37501 | tactatgcag ccataaaaaa tgatgagttc atgtcctttg tagggacatg gatgaagctg |
| 37561 | gaaaccatca tcctcagcaa actatcgcaa ggacaaaaaa ccaaacaccg catgttctca |
| 37621 | cccataggtg ggaattgaac gatgagaaca catggacacg ggaaggggaa catcacacac |
| 37681 | tggggactgt tgtggggtgg gaagaggggg gagggatagc attaggagat atacctaatg |
| 37741 | ctaaatgacg agttattggg tgcagcacac cagcatggca catgtataca tatgtaccta |
| 37801 | acctgcacat tgagcacacg taccctaaaa cttaaagtat aataataata aaataaaata |
| 37861 | aaataaaaaa acaaaaattg atgtaggacc aattcctgaa gaacactgac agttaatttt |
| 37921 | ttggtttagg aggaggagaa gccagcaaac gacactgagt agcaatatcc aaagaaaaag |
| 37981 | aggaaaaagg aaaactggga gattatgagt gtcccagagg gaatgtttca agattaccat |
| 38041 | cagcagtgag ctttgtgtaa aggtggcctc ctgtaataga ggtgcgggca ggagaaggca |
| 38101 | gaatagggaa aagggggtga aaaagcttcc ctcaagattt ataatacagt ggaagagaga |
| 38161 | gacagagaga gagaaagaga aagagagaga gagaacttaa ggaggtagag gaagagagag |
| 38221 | aaccaaaaaa gagggagctg agtatagaag caattagatt catagttttt agttgcggca |
| 38281 | gtgatatttg agtgggggcc ttttatatat tccattctag gtgtttccca gttgatggga |
| 38341 | gagggtctta cctagatctg catgtaaaag ggagtaggcc agctggcaga cttgacatgg |
| 38401 | atcagtggta gaacatccta gcagttctgt gaatactctc tgagaatgac atgaaaggta |
| 38461 | ttggttcagg ccttttggag gtgataaaaa ccaccaaaat gtggacttat tgcaaattgt |
| 38521 | atttgttacc atttgcaatg attataatta ttctcttata tataggcttt cttacatata |
| 38581 | gcttctctta cacatagcgt catgagttat gccttctctt acatatagtg tctgctatga |
| 38641 | gttatgccaa gcagggcaaa caaaattgct gcctttcttt aaaaagagga cgctcctagt |
| 38701 | atgggcctaa ttaattatga taattacagc tatggcatgg aacataagca cattcatata |
| 38761 | cacaaagaca ataaaataaa gaacagttca aaaacagaac agttacatta tatatcagtt |
| 38821 | tcagtatgaa taataccctg gactctgaaa tatgtctggg gcacattatt ctgtaattgg |
| 38881 | tggtgaaaaa aaatctgcat cttatctcta cgccaatcct tatgaaggag ctgtttttca |
| 38941 | ggagttcgag aaagagacac agggatgtcc agtcatcaaa gccgcagagc ctgaggaaga |
| 39001 | ataaaggatt tgtggcagga aaacccagta atgaatgtat tctgctagtt tctcagcata |
| 39061 | gaacttagaa aagaggccac agaaggaaaa gagaagtaat gttagacagc tgatgttggc |
| 39121 | aatgggcaaa gaatttcatt ctcatatgca gggcagtggc taaaggggca gtgttgtgag |
| 39181 | gaatcacatt ccaggtcatt catgtccagg gtgtggtagg aggactgtgt ttcatttatt |
| 39241 | ttgtacatgg cccagctatg accttgtgca aggaaatgct taatcatttt ctatcacagt |
| 39301 | tgcaaagaga ttcttatcct actcagaatg tacgtcttct cttctgtttc atttacagtc |
| 39361 | acaacccaag tccttgcttt gacctccaaa gcaccacttg atgtatccac ttcagaaaca |
| 39421 | cacacagaca gctcacctct ttctatccct taccttcctc ccctcttcac tcaaaccacc |
| 39481 | tacttccttt gcattcactc ttccttcagc ctgaaataat cttcctccaa atatctacct |
| 39541 | tctcactccc tcacttctct caagatacac ttaaatgtta tattccctat gaggcctccc |
| 39601 | ctggccatcc ctccccagcc ttcctatccc ccctctctgc tttattttat tctccttaat |
| 39661 | atatatcaca ctctgataaa ccattgaatg tacttatcaa gttattgcct ctctctccct |
| 39721 | ttccattgtc tccatcactg agagctctgt gaagaaaagg atttgtacct gtttcattta |
| 39781 | gtgctgtacc cccagttccc acaacagcgc aacaggcact caataaatag ttgttgaata |
| 39841 | agtgaataaa acagaagtag ctgcatattt tctggtaaca aatgatattc ttctgaaaat |
| 39901 | gtcatatttt cagacatatt tccgaaaata aattcaaatt agataaacat tgtattttta |
| 39961 | gaccatttct tctttgcatt aatcatcctt ctcaataata taacatttgt aaaacttagg |
| 40021 | ttagatatgg gctcttcaac tttccattac agaagataaa gtgaaaaggc tagacccaat |
| 40081 | ggtgttattc cttcatctac atctatcctt tggaaacaca tgaccaaatt gcttgccatc |
| 40141 | acaatctcaa aatctaccct ttggtattaa ctcacttcac ttgtccctct gtcccttttt |
| 40201 | agatggtagc catcggtctc tggagcagtg tagagtcaga acaacttcta tttggggaag |
| 40261 | aaatcattgc tggtgacctt actttcaatt actaactttc tagtgacatt tacataattt |
| 40321 | tagagaaaat taacacctac acttgtaaag ttgtggcttt cccacaccta tttatcatct |
| 40381 | ctcaatattc cttgaaaagg aaattatcaa tttatcattc tatattggca atgaaatgcc |
| 40441 | cctaatatct gtcacctata agacaattga agatgatgtg ttgaaagctt tctgaaaatg |
| 40501 | ctgatcatta ctttaaatgg aattgaaatt ccagtttatt atttccaaaa atatgatctt |
| 40561 | actgatcata ggataacatt tcataacatt tcagagattt cttccccttc gaggagccaa |
| 40621 | acccatagga cctctggact cccacagatc ctggcaggga gttcccactc ataaaagcac |
| 40681 | aggtgccctc agagtcattc agggatgaag aagcaaccct cattggccat gtcctacgtt |
| 40741 | ccccatatag taaggactgg aggagaccag tgctcaattc tgcagtctca gacagctgtc |
| 40801 | agaggagagt catgaatgtg cagtgtctag cacattacaa acgtttgtta attgactgat |
| 40861 | cattcatggt gtgacagccc tataactcag ctatcctatt cagtcagaaa ttaactcagt |
| 40921 | aatcaaagtc attaaaagga agaaaaaaaa aacctacagt accagacaga tggtggggaa |
| 40981 | atcagacaga tgaaaggaaa aatggctgta ggtcattgag taagacactg ggcagcaaaa |
| 41041 | cctgggcctt gtgcctggtt atactccaca ttatagctcc agcaaggttt ggcaggattt |
| 41101 | ccacagtcct ggcttattct aacctttctt gggagcagga gcagtgttgg tcagatagac |
| 41161 | agacacataa ggaatctgtc caactggcac cgtgtgaatt tgggctcttg gtgtacatgg |
| 41221 | ataactggga aaaagaggag agagacatgt aggactgatc ctaccgtttg tgaagtcttg |
| 41281 | ggcaagagta tgaatgaaaa cccacttctc ttcccctgcc tggctccact gcacacagta |
| 41341 | aagagcctca agcataggtg tgtggacatt gcaccatgta tccaagctct gaccatgcct |
| 41401 | cttgaaacag ctattcctca gccaccctct gaccatggga ggaatgaccc aggagaaatg |
| 41461 | accacatagg tcttgaaaat gggctcaggg ctatttacga agtcaattcc ggggtcccag |
| 41521 | gagtatggac taaaatgtga gtcaggcatg ccagatgggt atgttctatt gacttcaagg |
| 41581 | attcctcatg ctgtgggaag gaacctctcc agaagagaga cagagcagaa ccctctaaat |
| 41641 | gtggggcaca aagcaggagc ccctcttgct ggattcaaag ggtcatactg gaagagtgta |
| 41701 | ggttgagtct tattctcaca tcactcatat cacttacaca cttcttttat agccttagca |
| 41761 | gccatgccac aaagagaaac tcttcatgca tatcttttgg tccataagtc ataaatagtt |
| 41821 | atccttgatc ccatgtcttt tttagagcca tggacagaga gaagcaaaaa tataccaagt |
| 41881 | tcacactgag ttgtctccct tcatatctct tagcagtcac tgaaaggtta tgagactcag |
| 41941 | gcbgggtttc tatcctctgt ccctgaaacg acaacgttga cctcgtgatc aaccctagaa |
| 42001 | tccagagcaa gatctcagac tgtcctctct actaccagac agcacacttt gttttggggg |
| 42061 | ctgtgtgctt gaaatattag ctatggcaaa aggctttgag tcttatgaca ccccaagtaa |
| 42121 | cttttacttt aggaatttga aatacagcct tgctgtaatg ctgtctcctt aacaaagcag |
| 42181 | tacctttgaa atatttaaca acttgaaaag gaaaccgagc ttgaattttc ctttcaggtg |
| 42241 | ctcaggaaat aatgtttcac ttctgtctga aattcaccat ctcctcagac aaagaaggct |
| 42301 | cttatggtaa aaggaatggc attttctcca caattttcga ataaaagata aagagaaaac |
| 42361 | agcactgcag cctttttgtt aggatctaac aataaagaaa taatacggtt ttgccagggg |
| 42421 | agagctctgg ttttaagctc agaatacaaa aataggctga caaaatttta caaaggaata |
| 42481 | ttctcagcta ccactctgag gatggtagaa agtgaaattt caagaaaatt atattatttg |
| 42541 | attatttgat gatgattaag ctgattggcc agtcctatgt gaaattctaa agtagaagaa |
| 42601 | atgtgatgtt gtcttttctg ctcacctctc ccctcattcc tacccccaaa tctctgcctc |
| 42661 | taccccaaac ccagcctgac ctttgggaaa ggaatggggg ctgtcacttg caccgtagct |
| 42721 | cctcctgcct gcagtactct ccccccacag tccagcctcc ctctgctcag ctaacttttc |
| 42781 | ctatagctcc ttctggctac ttctaaggaa ccttccataa tgctgcccac cctctcagta |
| 42841 | acagcccctc tactatccct tgattacatg cactgtaatt ggttagtaat tgattttatg |
| 42901 | tcctctgcca aattatactc catgagagca aaaatcatga gtattatctt taatgtttaa |
| 42961 | atctccacaa ctatccccca tataagtcta gagaataaat gaatgagtga attaatgaat |
| 43021 | agaaactcaa gccattatgt tgccactcct aggatatttg gattaacttt aactgaagag |
| 43081 | taaaaagcat ttacctgtcc taaaggagac ataaaattag tgggagagta tttggagaaa |
| 43141 | aaaaagacac tgtaatacat tcttttgtgt tgcctaccct gatgtagtca ggtgtccctg |
| 43201 | atatggggtg ggctgaggat ttgaaataaa atacctaatt tgacattgta agtggaggaa |
| 43261 | tcaggatttg aaaccaaatt ggtttgacct aaatcaagct attatgataa ggacttgcaa |
| 43321 | gaaaaaagga atccataaaa accatatgaa tagctaccaa ttagtaagca tttatatgtg |
| 43381 | tcaattacaa agccaaatgc aaatcatgct ttatttatat tagccacctt ttatagatga |
| 43441 | agaaattgag acctgaatat taaaattgcc tacttttaca tagtaagtaa aggaatcagg |
| 43501 | gtttgaaccc aaattggttt cacctaaggt agaaaaccat cccagcaagt ctcctattaa |
| 43561 | ctggaaccct attgtggtgg cctgagatat aacagtagct gtggaagcgc tgtagagtcc |
| 43621 | tggccatcct atgtgctcct gatctggtcc ctcctgccac ctgcttctgc tccctgtgcc |
| 43681 | atccacccat ctggaagtct cccagtgtcc atcttcgggg gagacactca ccagagtttc |
| 43741 | cagcttccag ccagtatgga gtgcccctgt cccacagcaa tctcaccgaa atcacagcta |
| 43801 | catctgttaa aattaggcta ccaatgagtg atagatgagg gggaaaaata ataatagtgt |
| 43861 | actaaacaaa acaaatgttt atttttctca cacataaaaa tctagaggtt gaagtccagg |
| 43921 | gctggtccag aggctccaag gatctgggat ttagactccc tctttcttgt ttttccacag |
| 43981 | catatggctt ccatttctgg ggccacattg gtccaaaatg tatgcbgggg ctccagccat |
| 44041 | tgcatccata tttcagccac aggaaggagg aagtggggaa gaaaggacag gcccctaata |
| 44101 | cctgtatagt tcaagaagac tatcccgccc atacttccca accaccctta gttgaacaat |
| 44161 | gcbgtcttaa ttcaagacac tcacatgtct agccaaaaat ctgaattctg ttacaaacaa |
| 44221 | ggagaataga gatgtgcgcc acctcaatac ctcatccata gctacctttt cctttgtgca |
| 44281 | gctgtggcca agtgaaagct gaaggagctg tggtaaccct tctgaaggga ggctggggcc |
| 44341 | tttcacaaga ggctgcatga ttgacattta tcctgcatgg cctgtgaagt acagagaaat |
| 44401 | attttctctt gaagccacat catagcagtg gctgctttgt agcctgattc caccattatg |
| 44461 | cctttaaagt gcctagcaat tcagccttca catcatgcaa agaggaatat ctcccagtct |
| 44521 | ttgtaagatc agcttaattc taaccacctc cttacctccc actgcactcc tacacgcaca |
| 44581 | cacaaatctt cttcactcag agcagaacca taacccaagc cctaccacct agagactgaa |
| 44641 | gaatcaggct catgattaca aatatgcaat aattttttgt gtggataatg tcaatgggga |
| 44701 | tgatggtaag agaattcctt ggtttacaca ttgaccctct tccctgtccc ttacaatcag |
| 44761 | gaaatatttg tcccaacacc ttgtttcttc tgttgcaggc tcctgtggct gtcttgtcat |
| 44821 | gatattgttt gcctctgaag tgaaaatcca tcacctctca gaaaaaattg caaattataa |
| 44881 | agaagggact tatgtctaca aaacgcaaag tgaaaaatat accacctcat tctgggtcat |
| 44941 | tttcttttgc ttttttgttc attttctgaa tgggctccta atacgacttg ctggatttca |
| 45001 | gttccctttt gcaaaatcta aagacgcaga aacaactaat gtagctgcag atctaatgta |
| 45061 | ctgaaaggca aacctttcta taattttaca agggagtaga cttgctttgg tcacttttag |
| 45121 | atgtggttaa ttttgcatat ccttttagtc tgcatatatt aaagcatcag gacccttcgt |
| 45181 | gacaatgttt acaaattacg tactaaggat acaggctgga aagtaaggga agcagaagga |
| 45241 | aggctttgaa aagttgtttt atctggtggg aaattgcttg acccaggtag tcaaaggcag |
| 45301 | ttgactagaa tcgacaaatt gttactccat atatatatat gtgtgtgtgt gtgtgtgtgt |
| 45361 | gtgtgtgtaa gatgtcttcc tatcaaaaag atatcaaagg cacatggaat atattttaat |
| 45421 | aaaaacaaat aatatctcta atatatccac acatttgttg ccagatttca gaaaactgag |
| 45481 | ctgcaatcgc tttcctaaaa cagtagtgta ttaaatgaac atctataaaa tgtatcaaca |
| 45541 | cacattttaa aaaatttgtt taaagtatac tcttaggcca ggcgtggtga ctcacacctg |
| 45601 | taattccagc acttcaggag gccaaggtgg gaagatcatt tgagttcagg agttcgagtt |
| 45661 | acagcctggg caataaagtg agaccctgtc actaacaaaa ttaaaaaata aaataaatat |
| 45721 | aaaatatagg ctttaaaaaa gcatagtctt attaaccatg tctgttggtc aaaatctgca |
| 45781 | aactctaaaa gaagaaaaga agaaaaaacc aagcttaggg tatttttcct cccgtgcctg |
| 45841 | agtcccaatt acattcacga cagtactttc aatgaacata attgttagga ccactgagga |
| 45901 | atcatgaaaa atgatctctg cttagtacat ttgatgcaaa atgacttatt aggggctgtt |
| 45961 | tttctagcta tagtgtctcg agtactaata tgcaattatg aaaattatat taaatctggg |
| 46021 | attatgacgg tatcactgta tcatcttggt cttgttctgg ctgtcaccaa gcatgaccca |
| 46081 | ggtcaacttt ttttttcccc tgaattaccc atcaaattga tctgcagctg actaaaggcc |
| 46141 | acagctgagc ctggaactga cccttccttc atcctcaacc tgctgtcctc cagaaagcac |
| 46201 | caaggaaaaa gcagagaatg acagcaaaca gatcactagg cctctgacca caggtgctga |
| 46261 | gtactcagca gccctcatat aataggtttg aaagtactcc ttaaaataaa acactgtttc |
| 46321 | cctttggaac tatttacaag gatgaaacaa ccgtatacct gagaaataac ttgctctggt |
| 46381 | gtcaattcgc tattcgccag cagacatcag aacacaccga gtttccagat gctggttttt |
| 46441 | ccccttaaat caggaaatac acctggacaa tttctagaag actacaattc agtctagcca |
| 46501 | caaaggggat tttttttttt tggtaacagg ctagagcccg gttctgtaag tctttagctg |
| 46561 | aaatggtcca gtacaaaagc actggaaatg agtgggctag gaggacaagg accgtctcct |
| 46621 | gcgtgaggag ttggttggag gtccccaagg ccaggtaccc cctgcactct tattggattc |
| 46681 | ctctctgtct tcttggagtt ttgaaaaact ccttcgaaca ccaggctttt ttctttagaa |
| 46741 | aacaagtctc caatcgttct ctgttccgta gaaagagaaa gaaaacctgg agcagctgct |
| 46801 | gaaaaatcta atgaggaact aagaggcaaa cccacca |

[0167] A non-limiting example of a human wildtype CLRN1 genomic DNA sequence is SEQ ID NO: 47. The exons in SEQ ID NO: 47 are: nucleotide positions 1-544 (exon 1), nucleotide positions 28764-29180 (exon 2), nucleotide positions 31239-31418 (exon 3), nucleotide positions 32481-32519 (exon 4), nucleotide positions 44799-46433 (exon 5), nucleotide positions 44799-44935 (exon 6), and nucleotide positions 46128-46837 (exon 7). The introns are located between each pair of these exons in SEQ ID NO: 47, i.e., at nucleotide positions 545-28763 (intron 1), nucleotide positions 29181-31238 (intron 2), nucleotide positions 31419-32480 (intron 3), nucleotide positions 32520-44798 (intron 4), and nucleotide positions 44936-46127 (intron 7).

### Transmembrane Channel-Like 1 (TMC1)

[0168] The TMC1 gene encodes “transmembrane channel-like 1” (TMC1). TMC1 is a calcium-dependent chloride channel and interacts with transmembrane O-methyltransferase homolog in the stereocilia of hair cells. Mutations in TMC1 may lead to non-syndromic sensorineural hearing loss. For example, a D572N mutation in TMC1 has been associated with deafness (Kurima et al., Nat Genet 30:277-284, 2002, and Wei et al., J Transl Med 12:311, 2014).

[0169] The human TMC1 gene is located on chromosome 9q21. It contains 24 exons encompassing ˜314 kilobases (kb) (NCBI Accession No. NG008213.1). The full-length wildtype TMC1 protein expressed from the human TMC1 gene is 760 amino acids in length.

[0170] An exemplary human wildtype TMC1 protein is or includes the sequence of SEQ ID NO: 48. Non-limiting examples of nucleic acid encoding a wildtype TMC1 protein are or include SEQ ID NO: 49.

[0171] In some embodiments of any of the compositions described herein, the TMC1 protein comprises a sequence that is at least 75% (e.g., at least 80%, at least 85%, at least 90%, at least 91%, at least 92%, at least 93%, at least 94%, at least 95%, at least 96%, at least 97%, at least 98%, at least 99%) identical to SEQ ID NO: 48.

Human TMC1 Protein (NCBI Accession No. NP_619636.2)
(SEQ ID NO: 48)
MSPKKVQIKVEEKEDETEESSSEEEEEVEDKLPRRESLRPKRKRTRDVINEDDPEPEPEDEETRKAREKER
RRRLKRGAEEEEIDEEELERLKAELDEKRQIIATVKCKPWKMEKKIEVLKEAKKFVSENEGALGKGKGKRW
FAFKMMMAKKWAKFLRDFENFKAACVPWENKIKAIESQFGSSVASYFLFLRWMYGVNMVLFILTFSLIMLP
EYLWGLPYGSLPRKTVPRAEEASAANFGVLYDFNGLAQYSVLFYGYYDNKRTIGWMNFRLPLSYFLVGIMC
IGYSFLVVLKAMTKNIGDDGGGDDNTFNFSWKVFTSWDYLIGNPETADNKFNSITMNFKEAITEEKAAQVE
ENVHLIRFLRFLANFFVFLTLGGSGYLIFWAVKRSQEFAQQDPDTLGWWEKNEMNMVMSLLGMFCPTLFDL
FAELEDYHPLIALKWLLGRIFALLLGNLYVFILALMDEINNKIEEEKLVKANITLWEANMIKAYNASFSEN
STGPPFFVHPADVPRGPCWETMVGQEFVRLTVSDVLTTYVTILIGDFLRACFVRFCNYCWCWDLEYGYPSY
TEFDISGNVLALIFNQGMIWMGSFFAPSLPGINILRLHTSMYFQCWAVMCCNVPEARVFKASRSNNFYLGM
LLLILFLSTMPVLYMIVSLPPSFDCGPFSGKNRMFEVIGETLEHDFPSWMAKILRQLSNPGLVIAVILVMV
LAIYYLNATAKGQKAANLDLKKKMKMQALENKMRNKKMAAARAAAAAGRQ
Human TMC1 cDNA
(SEQ ID NO: 49)
atgtcacccaaaaaagtacaaatcaaagtggaggaaaaagaagacgagactgaggaaagctcaagtgaaga
ggaagaggaggtggaagataagctacctcgaagagagagcttgagaccaaagaggaaacggaccagagatg
ttatcaatgaggatgacccagaacctgaaccagaggatgaagaaacaaggaaggcaagagaaaaagagagg
aggaggaggctaaagagaggagcagaagaagaagaaattgatgaagaggaattggaaagattgaaggcaga
gttagatgagaaaagacaaataattgctactgtcaaatgcaaaccatggaagatggagaagaaaattgaag
ttctcaaggaggcaaaaaaatttgtgagtgaaaatgaaggggctcttgggaaaggaaaaggaaaacggtgg
tttgcatttaagatgatgatggccaagaaatgggcaaaattcctccgtgattttgagaacttcaaagctgc
gtgtgtcccatgggaaaataaaatcaaggctattgaaagtcagtttggctcctcagtggcctcatacttcc
tcttcttgagatggatgtatggagtcaatatggttctctttatcctgacatttagcctcatcatgttgcca
gagtacctctggggtttgccatatggcagtttacctaggaaaaccgttcccagagccgaagaggcatcggc
agcaaactttggtgtgttgtacgacttcaatggtttggcacaatattccgttctcttttatggctattatg
acaataaacgaacaattggatggatgaatttcaggttgccgctctcctattttctagtggggattatgtgc
attggatacagctttctggttgtcctcaaagcaatgaccaaaaacattggtgatgatggaggtggagatga
caacactttcaatttcagctggaaggtctttaccagctgggactacctgatcggcaatcctgaaacagcag
acaacaaatttaattctatcacaatgaactttaaggaagctatcacagaagaaaaagcagcccaagtagaa
gaaaacgtccacttgatcagattcctgaggtttctggctaacttcttcgtgtttctaacacttggagggag
tggatacctcatcttttgggctgtgaagcgatcccaggaatttgcacagcaagatcctgacacccttgggt
ggtgggaaaaaaatgaaatgaacatggttatgtccctcctagggatgttctgtccaacattgtttgactta
tttgctgaattagaagactaccatcctctcatcgctttgaaatggctactgggacgcatttttgctcttct
tttaggcaatttatacgtatttattcttgcattaatggatgagattaacaacaagattgaagaggagaagc
tagtaaaggccaatattaccctttgggaagccaatatgatcaaggcctacaatgcatcattctctgaaaat
agcactggaccacccttttttgttcaccctgcagatgtacctcgaggaccttgctgggaaacaatggtggg
acaggagtttgtgaggctgacagtctctgatgttctgaccacctacgtcacaatcctcattggggactttc
taagggcatgttttgtgaggttttgcaattattgctggtgctgggacttggagtatggatatccttcatac
accgaattcgacatcagtggcaacgtcctcgctctgatcttcaaccaaggcatgatctggatgggctcctt
ctttgctcccagcctcccaggcatcaatatccttcgactccatacatccatgtacttccagtgctgggccg
ttatgtgctgcaatgttcctgaggccagggtcttcaaagcttccagatcaaataacttctacctgggcatg
ctactgctcatcctcttcctgtccacaatgcctgtcttgtacatgatcgtgtccctcccaccatcttttga
ttgtggtccattcagtggcaaaaatagaatgtttgaagtcattggagagaccctggagcacgatttcccaa
gctggatggcgaagatcttgagacagctttcaaaccctgggctggtcattgctgtcattttggtgatggtt
ttggccatctattatctcaatgctactgccaagggccagaaggcagcgaatctggatctcaaaaagaagat
gaaaatgcaagctttggagaacaaaatgcgaaacaagaaaatggcagctgcacgagcagctgcagctgctg
gtcgccagtaa

[0172] A non-limiting example of a human wildtype TMC1 genomic DNA sequence is SEQ ID NO: 50. The exons in SEQ ID NO: 50 are: nucleotide positions 1-113 (exon 1); nucleotide positions 56102-56223 (exon 2), nucleotide positions 94568-94677 (exon 3), nucleotide positions 106121-106263 (exon 4), nucleotide positions 126797-126864 (exon 5), nucleotide positions 166909-166956 (exon 6), nucleotide positions 172743-172914 (exon 7), nucleotide positions 178718-178843 (exon 8), nucleotide positions 218319-218409 (exon 9), nucleotide positions 220644-220725 (exon 10), nucleotide positions 230050-230156 (exon 11), nucleotide positions 232986-233084 (exon 12), nucleotide positions 250613-250755 (exon 13), nucleotide positions 266539-266683 (exon 14), nucleotide positions 267323-267517 (exon 15), nucleotide positions 270086-270265 (exon 16), nucleotide positions 270391-270552 (exon 17), nucleotide positions 283582-283710(exon 18), nucleotide positions 294343-294410 (exon 19), nucleotide positions 299042-299281 (exon 20), nucleotide positions 305069-305194 (exon 21), nucleotide positions 308651-308729 (exon 22), nucleotide positions 308831-30882 (exon 23), and nucleotide positions 314151-314551 (exon 24). The introns in SEQ ID NO: 50 are: nucleotide positions 114-56101 (intron 1); nucleotide positions 56224-94567 (intron 2), nucleotide positions 94678-106120 (intron 3), nucleotide positions 106264-126796 (intron 4), nucleotide positions 126865-166908 (intron 5), nucleotide positions 166957-172742 (intron 6), nucleotide positions 172915-178717 (intron 7), nucleotide positions 178844-218318 (intron 8), nucleotide positions 218410-220643 (intron 9), nucleotide positions 220726-230049 (intron 10), nucleotide positions 230157-232985 (intron 11), nucleotide positions 233085-250612 (intron 12), nucleotide positions 250756-266538 (intron 13), nucleotide positions 266684-267322 (intron 14), nucleotide positions 267518-270085 (intron 15), nucleotide positions 270266-270390 (intron 16), nucleotide positions 270553-283581 (intron 17), nucleotide positions 283711-294342 (intron 18), nucleotide positions 294411-299041 (intron 19), nucleotide positions 299282-305068 (intron 20), nucleotide positions 305195-308650 (intron 21), nucleotide positions 308730-308830 (intron 22), and nucleotide positions 30883-314150 (intron 23).

| Human TMC1 Gene Sequence (NCBI Reference Sequence: NG_008213.1) | |
|---|---|
| (SEQ ID NO: 50) | |
| 1 | cagaaactat gagggcagaa cccagcaatc tgtgctttct ttcacaagcc ctccaggagt |
| 61 | tgctgaaatt taggaatcat tgccccaaaa agtggccctc ataatgatgc caggtaagga |
| 121 | aagacaacat tattacctat gtgtggtgtg ttaacattct ttatgaaaca tgtgtgaaga |
| 181 | cctaaatcga agactttctc catgagatat tccctaatca cattagtgaa ataaaactat |
| 241 | atttcctcta cttttctact gctacagaaa tctcccccag ttaggatagt cccagtttcc |
| 301 | tatttatctt tgtttttctt gcagtgcaca gcatgtcacc cagtaattga taagtttttt |
| 361 | tttttttgag acggagtctt gctctgtctc ccaggctgga gtgcagtggc gcgatctcgg |
| 421 | ctccccaagt agcbgggact acaggcgccc gccatcacgc ccggctaatt ttttgtattt |
| 481 | ttagtagaga cggggtttcg ccgtgttagc caggatggtc tcgatttcct gacctcgtga |
| 541 | tccgcccgcc tcagcctccc aaagtgctgg gattacaggc gtgagccacc gcacctggcc |
| 601 | taattgatat gtttaaatgt taaaattaaa tgcaatgatt tcctaaaata aacaaatgtg |
| 661 | ggacaattta ttgcactctg ttcaaattcc cattttgaag tggaattcaa acaaacatga |
| 721 | cagtaaaggg ggacagtgag cacagggaca agagaaaagg agaaagggaa gaaatacaga |
| 781 | gaactagata ggaggaagtg tcaaagactg atgggtgtaa gccaccttta cctctggata |
| 841 | ttggttttcc tttgaattgt ggtatgtggt catattgctt attagttata acatacagct |
| 901 | gtcagaagag tttttcaatt aaaatttcaa atgtaatatt aaaactgttt ggattccttc |
| 961 | ctactgggca ctggacactg tctgtggagc tgctggaaca gcgctgaata gggtcatatt |
| 1021 | ttaaaggaac tcagcctagt gcagtttctc aaccttagca ctattggcct ttggggcctg |
| 1081 | ataatccttt tttgtgaggg gctgtcctgt gcactgtagg atgtttagca gcatccttgg |
| 1141 | cttctactca gtagatgaca gtatcaaccc ccttccccag aagtgacaat taaaaatgtc |
| 1201 | tccagacttt tccaaatgtc ccctgaggag caaaattgtc tccagttgaa aaccactggg |
| 1261 | ttagtgggag aaacagataa gacagaagtt ctccatacac catgataatg ccatgatgcc |
| 1321 | atagggctgg caggagtgaa gggaagagca tctcacaaag actcgggggg atgcagggag |
| 1381 | gaggaaaaat taggaaatga agtgggctga gttgcagtta gcctgtgggg aaaatgaagg |
| 1441 | agaagggata aggaagaaga ggaggaagga gggaggaaga gtgaggagta atagggaatt |
| 1501 | atagttgacc ttgaacaact tggggtttag ggatgccgac ccttgcgtag tcaaaaatct |
| 1561 | gagcttaact tttgactacc ctcacacttt cctaacagcc tactgttgac cagatgcttt |
| 1621 | accaataaca taaacagttt attaacacat attttgtatg ttttatgtat tatacactgt |
| 1681 | attcttacaa taaggtaagc tagagaaaag aaaatgctat taagaaaatt gtaaggaaga |
| 1741 | aaaaatatat ttactgttca ttaaggggaa gtagatcatc ataaagctct tcatccttgt |
| 1801 | catcttcaag ttgaataggc tgaaggagga gggggagaga gaagagactg gccttgctgt |
| 1861 | cttaggggtg gcagggatgg tagaggtgca ggaggtggaa ggggaggcag gaaaggcagg |
| 1921 | cacactcggg gtagctttcg ttgaaagaaa tcttcatatg agtggaccca tgcagttcaa |
| 1981 | acctgacttg ttcagagtca actgtacttg ttccaggcta agaacagaga ataaaaaaaa |
| 2041 | aatgtataga ggcctgaaac agcatattat attaaaagaa ctcaaagccg gtaaatgctt |
| 2101 | tgctactgaa gcataaagtg agaaaggggc atcatgggct ctgaaattgc agccacaagt |
| 2161 | ctacagaaca catttttcat agcccaaggt cagtcttcta ttaccctttg cagtgaggtt |
| 2221 | atcatcatcc attttcactc gtcagtgctg gggagcccat taaatacttg ccactatact |
| 2281 | tggtcccaac agttaataga ctgtagcatc ttttatttct tcacctagcc tgaaatcagt |
| 2341 | tgagcttttg cagaatctta gatatgtcgt ttttttcttc aggtttagaa tggggcactt |
| 2401 | aaaaagatgc atagtacttg aaaatagaga aagaaaatag catgtagaaa tttgtgcctt |
| 2461 | tattctgccc aaacgtctca aaaaggaaaa aaataatttt aagggtaaat attgtcatca |
| 2521 | atttatctga gctcttttga cttcctttga gcctgaaaaa caggatcagt gtctttttag |
| 2581 | tatttaccat agtgcctgat atgtagaagg tgtttgacca atgtttatta gataaatgtt |
| 2641 | cacttttatt actagtaata ttaaccacat tttaatagag actaataata catgataaac |
| 2701 | ttctcaagga tgcgatctca tttgatcact ataacaaccc aatgaggtaa gcgaggaata |
| 2761 | gttgttaact ctaatacatg ttatatctta tccttgaccc agtattaccc cagtcatgcc |
| 2821 | ttcctttccc tgcaatgaaa gaaaaccgat aaacacaaaa tgttgtatcc catataagca |
| 2881 | ttcattctta tggtagataa gtaaatggaa aagataggta tgcattctca atttttttaa |
| 2941 | gtcctagaat tataaaacag taaagaagtg agaagagaga gaaatcttaa gggaccaacc |
| 3001 | tcttgatttt acaggtgaga aaactgaggc cacatagcca tttagtgcag agccaggatt |
| 3061 | ataaaccaga tgtttggaat cctatgtggt ggtggacacg aggatatact aattagcgtc |
| 3121 | gttaccggaa aattccacat atctctaagg agcagatcac cacacacctg cacagcccaa |
| 3181 | gcctggattg tggaggtttt tcttgtagag tttgtctttg atagaaagat acggtccaga |
| 3241 | aggccggctt caaggacata agaaagggca tattcaaaac aaatacatgt atgcctattc |
| 3301 | ttttaaaccg gtacttaaca atagtatcca ggtgtccaaa tataatagct tatctgtttt |
| 3361 | attttttcca gaaaaggaaa caaggtctta gagaggttac attttgcata ggattttgtt |
| 3421 | agccaagtca gcatctgttt gcatcttaaa aatgagtcat acctattcct tgtaagtagg |
| 3481 | acaggagggc agctggaatt tcccagctca ctccttgtca ctgcttcctg cctctgctgc |
| 3541 | tctttgtcct ccacagcacg cttcattggc taaaaagtga accagatact acattacctc |
| 3601 | agggcagttg taagtactga gtcagatgcc ttaggcttgt gtgatgggaa gtttagggcg |
| 3661 | agaccaatgt cttgctttaa caacagtgtg aataagttaa tttcttttga gattttatta |
| 3721 | ctcaatattc cacccagaaa gaaacacaga tgacactcag ccaatcaaag gccatctggg |
| 3781 | actgacaaac gcagagcttg ttgtagatga caaggctcag tggatggatc atcactgaaa |
| 3841 | gaaagggaaa cagtttgaac tgttgtatct ctctccttgc tcacatgaaa aacaaaaaaa |
| 3901 | tccttggcca gttgcggtgg ctcacgcctg taatcccagc actttgggag gcccaggcgg |
| 3961 | gcagatcact tgaggtcaga agttctggac cagcctggcc aacatggcaa aaccccgtct |
| 4021 | ctactaaaaa tacaaaaatt agccgggcgt ggtggcacac acctgtattc ccagctactt |
| 4081 | gggaggctga ggcatgagaa ttgcttgaac ctgggaggtg gaggttgcag tgagccaagg |
| 4141 | tcgtgccact gcactccagc ctggatgaca gagtgagact ccgtctcaaa aaaaaaaaaa |
| 4201 | aattccttaa ccacagacta agtaagcatt attgcacaga gtgtcattcg ctaatcttgc |
| 4261 | ttgtgcctga actttgaaag caccagcccc ttgctttggg ggcbgggggc gtggggtgta |
| 4321 | agtgtgtgtg tcctctagaa gaagacaaca ctgagaacag aaggagagga tcttggagat |
| 4381 | ttgttaattt cctattgcag ttagccttgt ctggggctct cactttagca cttaaaataa |
| 4441 | catactcctt tgcacagatg ttattttttt ctcttcatgt gtacaacttg aattatccaa |
| 4501 | tggccttgct ttgaggatat tcatcctatc ttattgatcc tgtcactgtg taggacaatg |
| 4561 | gagaacacag taaaaaaccc tcaatggata ctacttacac taaattaact ctatgaattc |
| 4621 | aaaatttgaa gatgctactt aatcatgtaa gcctggttct ccaaaacttc atctgccatg |
| 4681 | ggaaaaatca aagcttgtaa aatgattaaa cttgtaaagg aattaaactc taggattcac |
| 4741 | tcattttata attggtattt tcaccctaag agctttcttt ttcctctctg gtgtttaaaa |
| 4801 | acaaagtaaa accagacaaa acaagattaa ctaaattaaa acccctgtga ctttaaaaaa |
| 4861 | tgtagccaag aataatgtgc aagtgtctag ttaggccaat agatatcctt aacatacgtg |
| 4921 | agcbgggaac acaaatgagc atgaagggca aggaagagca ccaccccctg cttcttttcc |
| 4981 | tgctcctgtt cttgcagagg gtcaggcttg gagaccacat atggtcagct caacactcaa |
| 5041 | gtccaccaag cagcccatga ggaactcttc cttccagagt tgtgcacacc atgcagtgtg |
| 5101 | gtccacctgc agaagcacac aacaggcgct gcctgggcca gaggtccatt caggccatgg |
| 5161 | aattggtctc aatgccattt aggcatgaat ccagggtcct gggtaccaga cgcatggtct |
| 5221 | aggtaggggg tgtcatgtac taggtgagca tggggttccg ctgggcatgt tcccttgtct |
| 5281 | tgtaggatgt tagctctgag gggcgtggct ggaagaaggc tagccttgag ccctctaaaa |
| 5341 | ggcagggctc agggcaaagc tcccagttgc tcaggcctgt gggtaatact gcttaaaaat |
| 5401 | ccccttgaga acttctttaa aatgcaaata tctcgattct tttgtagttc aaaagcatga |
| 5461 | tgattgggtg ttcacaggca tgtgtaagac gtgacaccct ctgaacctcc ttatgacccg |
| 5521 | gtacattacc tgtctgacct gaaaaaaaaa tgcaaatttc tggattctac ccgcctcccc |
| 5581 | gcactccgac attacgatgt agcagctctg tggtaggatc caggaatctg cctgtgtaat |
| 5641 | cacaggttga tattctggtg tttcctggtt ttgctctgct gatttggggg atgtttacca |
| 5701 | gcaggagagc agcctctttc ctctgccctc ctcccttgct gccctcccca gaccccagtg |
| 5761 | actcacgctc ctcctgctcc tcctgttgct ggcctctctg ttgtggttgc cagcgctact |
| 5821 | ttgcagacgc tgcctgctcc ctgcacgcca acacagattc tgtttccctg cgaccgctgc |
| 5881 | tgctgttgtt tgttccgtcc ctggtttatt gtaggagagc tgattgttct gttgccactg |
| 5941 | ctaccaagct gcaaacacca ggctcacggt gcaaggggaa ggggcttctc ctctgggtgt |
| 6001 | tctgcctcta tcgcctaggc tctcaggctt tgttgccaat ggcactgcga gaccctaaac |
| 6061 | tatggccttg tgattcccac atctccattt agttctttct tttgttctct aagatctgag |
| 6121 | aaggagccca tgtctttcag tgttcctgtt ttcttgcgat acttcccccc tccccgactc |
| 6181 | cagaatttag ggcaaccttc tgcbgtggtc tgaatgttta tttctctcca ccccgccaaa |
| 6241 | cttatatgtt gaaatcttaa cccctaaggt ggtggtatta gaaactgaag cctctgggag |
| 6301 | gtaattaagt tataaggaca aagccctcat gaatgggatt actgttctta taaaaaaaag |
| 6361 | gccccagaga gctagctagc tccttccacc atgtgaggac acaacgtgaa ggtgctgtct |
| 6421 | atgaggaagg gtccctcacc agacaccaat catctggcac attgatcttg aacttcctat |
| 6481 | cctccagaac tgtaaacaaa taaatttctc ttgcttataa accataagtt catgattttt |
| 6541 | tttttttttt tgagacggag tttcgctctt gttgcccagg ctggagtgca atggtgtgat |
| 6601 | ctcggctcac aacaaactcc gcctcccggg ttcaagcgat tctcctgcct cagcttccca |
| 6661 | agtagcbggg attataggca tgcgccacca tgcctggcga attttgtatt tttggtagag |
| 6721 | acagggtttc tccatgttgg tcaggctggt ctcgaactcc tgacctcagg tgatccaccc |
| 6781 | gcctcggcct cccaaagtgc tagggttaca gatgtgagcc actgcacctg gccaagttca |
| 6841 | tgatttttgt aattagcatc caaaatggac taaaaccccc atcctcctga aggttctgaa |
| 6901 | tctgaggacc caagacttgg ctctcagcct taatgtcctg ctcccactat tttcaggggg |
| 6961 | cccaatataa atttcctgag tttttgaggt ggttgggctt gcagactgac ctttagtatg |
| 7021 | ccctttgtta catttacaaa atagattgct tacagggtta gacaaataca gttgaccctc |
| 7081 | tgtatccctg ccttccatat ccatgggtca aaattatttg gaaaaaaaaa tgtgtctgta |
| 7141 | ttgaacatgt atagattttt tttttgtata tttcctaaac tatatcgtat aataactact |
| 7201 | tacagagcat tcatattgta ttaggcatta taagtagtgt agttatgatt taaagtatgt |
| 7261 | gagagaatgt gcacaggtta tacagaaata ctacaccatt tttttttttt taatcaggga |
| 7321 | ctgaagcatc ttttcagcta tgactttggt atccggtggc gggtggggcg gtgggtgggt |
| 7381 | cctggaacca ttcctccatg aataccaagg gataactcta attgctaaat cgtttcctat |
| 7441 | ttttgtgaac tggtaaagga ctgcatgaga aaggccaaaa attaaagaat aatatgctta |
| 7501 | ttcaagcccg gtgtggtggc gggcacttgt agtcctagct acttggaagg ccgagatggg |
| 7561 | cccaggagtt tgaggctata gagggctatg gttgcacctg tgaatagtca ctgcacacta |
| 7621 | gctcgggcaa catagctaga ccctgtctct aaaaaagaaa aattctgctg taataaacct |
| 7681 | gcacgcataa aatgatgtct atgtgtctat atagtgtgta tatacatatg tgtttaggaa |
| 7741 | atgtgtatat atgtgtgtgt gtttgtgtgt gtggatactg tattagttaa gacaaaaaaa |
| 7801 | tctggcttca tatgttataa aataatgtct ggagctatcc actcaagtgt gctttcttgt |
| 7861 | ttctctgttt tttttttttt cctatttcat tcagtggttt tcactgcctt tgggaaaaag |
| 7921 | tgacacagca aaacacttag aagaatcaaa tgtttatcct ttgagaatgt ggtctgtaca |
| 7981 | taagagaaaa catttagaat caaattatga gactaaacca gtttccctca cctgcagcta |
| 8041 | gataaaaatt tctaagagga aggagagaat caggaaagat tgaagacttg actccctgat |
| 8101 | aagggttctg cccgagttct gagaatggag aataaaagac accctccccc tctctaatag |
| 8161 | attttgtcag tgaaggtcag agaggcccac gaaatcaggt ctggggagca aggtaaaacc |
| 8221 | cagaatttct acatgatcat gttaaagagg gaataaagga atatcattat agtgtatctg |
| 8281 | ggcaggtggg catgagacag cctgattgag ttcctgaaat cccaggtcgg tgtgggagca |
| 8341 | gcagaatatt ttaggtggct gagagctcca tagtttcttt ctttctttct ttctttgaga |
| 8401 | tggagtctca ctctgttgcc caggctggag tgtagtgacg cgatctctac tcactgcaac |
| 8461 | ctgtctccct ggttcaagta attatgtctc agcttcctga gtagcbggga ttacagatgt |
| 8521 | gtgccaccac acctggctaa ttttttttta tttttagtag agatgggatt ttatcatgtt |
| 8581 | gcccaggctg gtctcaaact cctgacctca agtgatccac ctgcctcagc ctcacaaagt |
| 8641 | gcbgggatta caggtgtgag ccaccagcag tcccagctac tcaggaggct gaggcagaag |
| 8701 | aatcgcttga acccgggagg tggaggttgc agtggaccga gattgtgcca ctgcactcca |
| 8761 | gcctggtgac agagcaagac tccatcttaa aaaaaaaaaa accttctcaa ggtattttct |
| 8821 | gtgcttcttg ttttctcttt tgtatttttc atctttatat ctttgtgttt cattctggat |
| 8881 | aacttttagt gacctgtctc ctagttcact aattctcttt ttagctatgt ctagtattat |
| 8941 | aatttgttta ttgaattatt aagtttaggt atcaaatttt cagctttagg atatctaatt |
| 9001 | tgccacttgt tttctgccat gatttttttt ttttttttga ggtggagtct tactctgtca |
| 9061 | cccaggctgg agtgcactgg tgtgatcttg actcactgca agatctgcat cccgagttca |
| 9121 | catcattctc ctgcctcagc ctctcaagta gcbgggacta caggcgcctg ccaccacgcc |
| 9181 | cagctaatta ttattattat tattattatt tgtattttta gtagagacag ggtttcacca |
| 9241 | tgttagccag gatggtctcc atctcctgac cccatgatcc acccaccttg gccttccaaa |
| 9301 | gtgctgggat tactggcatg agccactgca cctggcttct gccataattt ttaaccttga |
| 9361 | gttttaccta cttaaacata gcaaacacag ttgtttatat atttatctaa taattccagt |
| 9421 | atcaggagcc tctggagtct acttttgtct actttcattg ttttttgttt tttaaattta |
| 9481 | cattaacagt gtctagtctg tatttatgcc tggttacttt tgattgtgtg ctagacattg |
| 9541 | tttttggcaa ataatttttt aaacacaata tgtacaaatc atatgaagcc tagactggtg |
| 9601 | ttttgttcac caaaaaagat tttaaattac ttcagttacg ttcctaggga cactattaac |
| 9661 | tcaggatgat gttaattgaa gtttcagatt tgatattttc caggtcaact ggaccaactg |
| 9721 | tccctgctat atgatttatt tcctaaagca atatcaagtt cagctctgca cctctcttat |
| 9781 | atactatgga gctctcagtc acataaaata ttctgctgct ctcacactgc cctgtagttc |
| 9841 | ataagaggaa cagtttactg ttaatccgta ttactcttac atctagggtg tagctctttg |
| 9901 | agctaccagt ccaaagtgaa gaataattta ctgaattcct actttgtctg gctctaggca |
| 9961 | ctgatttttt ttaccctctt ggccacctat cttcaattgg aaaatgccct caattcaaaa |
| 10021 | atgctccaag tgccaagctt tcctatctga attcccattt tttcctgtat ctggctggca |
| 10081 | attcattaga atcctgctag ccctctgatg cttctaagat tttcatcttt tatttttatt |
| 10141 | tatttattcg agatggagtc ttgctctgct gcccaggctg gagtgcagtg gtgtgatctt |
| 10201 | ggctcactgc aacctccatc tcctagggtt aagtgattct cctgcctcag cctcccaagc |
| 10261 | agcbgggact acaggcatcc accagcatgc ccggctaatt ttgtattttt agtagagatg |
| 10321 | gagtttcacc atgttggcca ggctgatctt gaactcctaa cctcaggtta tctgcctgcc |
| 10381 | ttggccttcc aaagtgttgg gtttataggc attagccacc atacccagcc tgaagttttg |
| 10441 | attaaaaatg ctttactggg ctgggcatgg cagctcacgc ctgtaatccc agcactttgg |
| 10501 | gaggttgagg cgggcagatc acttgaggtc aggagttcga gaccagcctg accaacatgg |
| 10561 | tgaaacccca tctctactaa aaatacaaaa attagccagg tatggtggtg catgcctgca |
| 10621 | atcccagcta ctcaggaggc tgaggcagga gaatcgcttg aatctgggag gcagaggttg |
| 10681 | cagtgagccg agatcgtgcc actgtactcc agcctggaca acaagagcga gactccgtct |
| 10741 | caaaaaaaaa aaaaaaaaaa aaaaaaaaaa aaaaaaaaaa aaaaaaactt taccggaatt |
| 10801 | aaagcccagt catcttgaag ccatgatcat gacgcbgtgg aagaaccggt gaggtaggat |
| 10861 | gagacatatt ctcagatgct atgctgattt ggggcbgtga tgattttgga ccatagacta |
| 10921 | tgatgaggct tcaaaaagag tgcaatagtg tattttaatt tctttggtta gattcaaatt |
| 10981 | aatcttcaga aagacaaaat gcagatgtag tcttgttaga gcttgctgat gagactaaat |
| 11041 | tttccaagtg tttgaggaat gcctaacagg ggaaaggcaa agcaaactat ttttaatgac |
| 11101 | cttatggctc tgaattgcta aaagggagtc agtccaccag gctcaggcta cttggagtag |
| 11161 | aggatcctgt ttcagtgaca aactggctca tcccttaatc tgccataaaa tgatggctta |
| 11221 | gcatacatgt aggagcbggg gctaagggag aaggaggtgc tgtgttttgc agaagaagct |
| 11281 | acattctgta gtaaggcctg actcttccct ggccttggag gggaaatact tgtgagacag |
| 11341 | tggccaggat cagctgaagt gccctctctt cttgctttgc ctatgggaca ctgagcccct |
| 11401 | ttttgtggaa tatattcatc cagagaaccc tcacacctta taatgcataa agtgataaag |
| 11461 | gcttggagat ctggagaaac ccaaggtgcg atccctggct ctagaagaaa ctctgggcag |
| 11521 | ccagcatgat ttacttttct ctgctccaaa gactggagga taaattaaag gaaaagaggg |
| 11581 | tatgacccag caatccactg gtgcgagttg ttgctttaag caaagactac tgcttctctt |
| 11641 | cctgattttc ccctgaccat actctcccag aggtgtctcc cagcaaccac cagagttgtg |
| 11701 | gttaagtaca cctagccaat ccaataaatc taaaggagat gcagtccaca caaccttgca |
| 11761 | tgacttgtca tgtgagttac tgttctggag agacaaactc aggctggaaa cttatttgag |
| 11821 | atagcttatg aaaacaaaga taatttatga taaggataca ggcactctca tacaatctaa |
| 11881 | ggtagaaaaa cagctaagca tcagaacaaa ctggaccaaa gacttaaaca cttctgctcc |
| 11941 | tttgtgtaat tggtttcatg cgtttctctc tctcccttcc tctctctctt ttctctctgt |
| 12001 | ggactaggtt tttctacttt tcatatacaa attttaaaaa tacaatttct ggccaggtgc |
| 12061 | agtgactcac gcttgtaatc ccagcacttt gggaggccga gggaggtgga tcacttgagg |
| 12121 | ccaggacttt aagaccagcc tggccatcat ggtgaaactc catctctatt gcaaatacaa |
| 12181 | aaattagccg ggtgtgatgg tgcacgcctg taatctcagc tacttgggag gctgaggcag |
| 12241 | gagaatcgct taaacctggg aggcagaggt tgcagtgagc tgagattgtg tcactgcact |
| 12301 | ccagcctggg taacagagtg agaatctgtc tcgaaataaa tgaataaata agtaaaataa |
| 12361 | acaataaaaa taaataaaga caattttaaa aatttcccaa cattaagtgt cagcaatttg |
| 12421 | gagagggaca gctgtctctt gttctctctc ttctccaatt ctcaattcct aggtctgatg |
| 12481 | ctttccctgg ctcaactgac tatggttgtg gggtagggcc atgaaacaga aatatcacat |
| 12541 | taggatccaa cctttaatta tgtagatgga cagcagttta cagaaaaagt ggtggggagg |
| 12601 | tggagggagg tgctgaacag acattctaaa agggctccac caaagaaagc tatttgttat |
| 12661 | atttatgaac attctggaaa attctttcaa ttgtgttcat gaataaatta tgattggtta |
| 12721 | aaagctaaca cacatgtaga ttatataact tctaaaattt gtatttggta tctgaatcta |
| 12781 | tatattattt tggcatgtat agaaaaatcc cagatatttc aaaggctatc attagaaaaa |
| 12841 | cgttaatgaa aaggttaatg gaattctata tatttagttc ctgtgagaat gtccagttta |
| 12901 | actttcttaa tcaactgatg aagaaacaga actgaaatca caagattata aagatatttt |
| 12961 | aacgatgcat ttaggttttc attctaaatg ctgaaaaaag gtatccctgc aaatactggt |
| 13021 | taagaaatta agaagtccaa aacccaataa tgtagttggc agcctgttat aaagatttag |
| 13081 | agtattcaaa gataaaggca aataaaaaga ctacttttta taccagagta gaaacagttt |
| 13141 | attttcatga tcactactct tacttcaaat atatctatta tctaagttga tgcttgcaaa |
| 13201 | aagtcctgat tcttacacaa aggcagtcga ttcatggatc tcttagagag agagaaaaaa |
| 13261 | aaaaagctag ttgggtgtgt tacagttata tgaatcatgt aggatgctgc ttaacgctat |
| 13321 | atttatcatg gatgaaggca tgttttcagg ggaaactatg agtctaccta aagttaccca |
| 13381 | gttcacctct gttccaaggg actcatcttt tcagcatttt gtttagcatg ttacaaagta |
| 13441 | ccccgatgtc ttctaaacta ttaggattgc aggaggaaac tctcccagag ctgctagaag |
| 13501 | tcatccttga aagtttggat ttctcccgaa aacttgtatt tctatcattg ttttaactat |
| 13561 | cttcttgaat cctcttgatc ctgacctaca tgtcctcttc ccttgattgc atttaaattt |
| 13621 | agctgcatat aaccttgctc ttttccttct aatccaacct ataaaccata tcaggggagg |
| 13681 | atatgtgatt tgtcaatttt gttgcctcac ttcctcctca agaactttca gtggctccat |
| 13741 | tttacctctg agattaaatt gcagccactc atcctgagtt ttggtgttcc acaatctgac |
| 13801 | atatctagtc agctttgtgt tctagtgtgt ttgtgttgct ataaaggaag actgagacta |
| 13861 | gatagtttaa taagaaaaga ggttgatttg gctcacaatt ctgcttgctg gaagattggg |
| 13921 | catttggtaa aagccttagg ctgcttctat tcatggcaga agagtaagcg gagccttcat |
| 13981 | gtgtggaaat catagggcaa gggaggcagc aagggaggtg tggagaggtg ccaggctctt |
| 14041 | tttaacaacc acttctcatg ggaactaata cagtgagaac tcactgactc tttctacagg |
| 14101 | gagggcatta atttattcgt gaatgattct cccccatgac caaaatacct ctcattaggc |
| 14161 | cccacctcca acattgggat aaaatttcaa catgaggttt gaagggggga caaacatcca |
| 14221 | aactatagca ttctgctttg gccccctaaa acttatgtcc ttctcacatt caaatacaat |
| 14281 | catttcttcc taatagtccc taaaagtctt aacttgttcc agcataaact caaaagtcca |
| 14341 | aagtccaaag tatcacctgc gactcaaggc aacttcttta cagctgtgag cttgcaaaaa |
| 14401 | taaaaaatga attatattct tccatgatac aatggttgta caggcattga gtaaacattc |
| 14461 | ccatttccct aagggagaaa ctggccaaaa gaaagtggta acaggtccca tccaagtctg |
| 14521 | aaacccagtg cggcagacat tctttttttt gaggcagagt ctcgctccgt cacccaggct |
| 14581 | ggagtgcagt ggtgcgatct cggctcactg caagctctgc ctcctgggat cacgccattc |
| 14641 | tcctgcctca gcctcctgag tagcbgggac tacaggcagc tgccaccatg cctggctaat |
| 14701 | tttttgtatt tttagtagag acggggtttc actgtgttag ccaggatggt cttgatctcc |
| 14761 | tgacctcgtg atccgcctgc ctcagcctcc caaagtgctg ggattacaga cgtgagccac |
| 14821 | cgcgcctggc cagacattaa ttcttaaaac tccaaaataa tttcctttga ttccatatac |
| 14881 | cacatcctgg gcatagtagt gtgaggggtg ggtcctaagg ccttaggcag ccccactctt |
| 14941 | tggctttgct gggtgcagcc cacgtgactg ctctcacaga ttgaagccca atgcctgtgc |
| 15001 | ctttttcagg ctgcagttgt atgttgctgg tggctctata attctggggt ctggagggtg |
| 15061 | gtagccctgc tcccacacct ccaatagata atgcccaagt agaggctgtg tgtggttgat |
| 15121 | ctgaccctat ggcagacttc tgcctgcctt cccaggtgtt ccaataaatc ctctgaaatc |
| 15181 | taggtggaag ctgccaagcc tccaacattc ttgcattatg ggcacctgca gatttcacac |
| 15241 | catgaagcca ccaaggctta ccacttacac ccacctaagc agtggctcaa acagtacctg |
| 15301 | gggccattgg agccatggat ggagccagag tggccaggat gcagacagca gcatcctgag |
| 15361 | gcagcacagg gcagtggtac cccaggcttg tcctgcaaaa ttattttgtc ctcctaggcc |
| 15421 | tctaggcttg tgatgggagg agcagcctca aaggtttctg aaatgccttt ggggcctttt |
| 15481 | ttttccaaag tcttggctat tagaacctag ctcccactta gtcatgctaa tatctctcta |
| 15541 | gcaagtgttt ggctgcatcc ttgaattcct ctcctgaaaa cactctttct tcatctacca |
| 15601 | cagggccagg ctgtaaatct tccaaatttt tatgctttac ttggttttta gttacaattt |
| 15661 | acaactttag gtcactcatt tgctgccata tctagtttac aatcatattt acaattaaaa |
| 15721 | gcagtgtaaa ccaaaaagta tctgagacag gtctcaatca atgtaagggt ttattttgcg |
| 15781 | atggttaagg accatggccc atgacacagc ctcaggaagt cctgagaaca tgtgcccaag |
| 15841 | gtagttttgt gtagcttggt tttatacatt ttagggagac agaagttaca gacaaaaaca |
| 15901 | taaatcaata catgcaaggt atacattggt ttggcccaga aaggcaagac atctacaagt |
| 15961 | gggggcttcc aggtcatagg tatattcaaa aatttcctga ttggcaatgg ttgaatgagt |
| 16021 | taagctctgc ctgaacagtt gaagtcagct tgagttaaga taaagaggtt ggctgggcac |
| 16081 | tgtggctcat gcctgtaatc ctagcacttt taggaggctg aggtggtcag attgccacct |
| 16141 | gggcaatctg tttgagatca gcctgggcaa catgatgaga ccctgtcttt ccaaaaaata |
| 16201 | aaaaaattag atgggcatgg tggagcacac ctgtagtcct tgctactcga gagactgggg |
| 16261 | caggaggatt acttgagccc aggaggcaga ggttgcagtg agctgagatt gcaccattgc |
| 16321 | attccagcct gggtgacaga gccagaccct gtctgaaaaa aaaaaaaaaa aaagtgaaag |
| 16381 | tcaaggttct tgtcatgtgg atgaagcctc caggtagcag gcttcagagt gaatagatga |
| 16441 | tgaatgtctc ttattagaac ttaaaaggtg tcagactctc tggaaaaaac ttggtaaggg |
| 16501 | agagattctc tacagaacac taacttcctc cacaagagac aacattgcag ggccttttca |
| 16561 | aaatgtcaaa taaatatatt ttgggataaa atacttgtat tgtattgtat tgtattgtat |
| 16621 | tgtattgtat tgtattgtat tgtatcgtat ttttgagaca gagccttgct ctgtcatcca |
| 16681 | ggctggagtg cagtggcacg atctcggctc actgtaacct ccgtctcccc agctcaagcg |
| 16741 | attctcctgc atcagcctcc tatgtagctg ggattacagg tgtccaccac catgcctggc |
| 16801 | taattttttt gtatttttag tagagatggg gtttcaccat gttggccagg ctggtcttga |
| 16861 | actcttgacc tcaagtgatc tgcctgcctt ggcctcccaa agtgctggga ttactgggat |
| 16921 | tacaggcatg agccaccaca cctggacaat aaaatacttt tatttccttt aggtcttgct |
| 16981 | atgtcatgtg atgctatatc agagtcgggt tcaaatttgg tatcttattg ctacaaagag |
| 17041 | tctgtcttgt cagtcatatg atctctgttt taatgttaat gctggtcatt tgtgtctaaa |
| 17101 | ctccaaaggg ggagggtgta ataaggcatg ttgggtaccc tctcatcttg ctatggcatg |
| 17161 | agctagtttt tcaggtttct ttgggatctc cttgaccaag gggtccattc agttgattgg |
| 17221 | gggagtttga attttaattt tgatttccag cagccacgcc acttcttgaa tgctgtgttg |
| 17281 | cttagaaatt tcttctgctg ctgggcatgg tgactcatgc ctgtgagagg caggcacttt |
| 17341 | ggaaggctga ggtgggcaga tcaattgggc tcaggagttt gagaccagcc tgggcaacat |
| 17401 | ggcaaaaccc catctctaca aaaaatacaa aaaaaaaaca acaacaaaaa aacaaatcag |
| 17461 | ccaggtgtgg tggcatgtgc ttgtagtccc agttactcgg gaggctgagg tgggagaatg |
| 17521 | acctcagcct aggagatgga ggtttcaatg atcctagatc gtgccactgc attccagcct |
| 17581 | gagtgacaga gcaagatcct gtctcaaaaa caaaacaaaa caaaacaaaa tttccgccag |
| 17641 | atatcctagg tcatcactct taactgcagc cttccacaaa tccatagggc atggacacaa |
| 17701 | cacagccaag tttttttttc taaagcataa catggaaccc tttgctctag ttcccagtaa |
| 17761 | gtttctcatt tccttctgag acctgctcag ccttgccttt actatctata tttctatcag |
| 17821 | cattttggtc aaaaccactt aactaatctc taagaagttc caaactttcc ctcatctgcc |
| 17881 | tgtcttcttc tgagccctcc aggttcttcc aacctctgtc caatgccctg ttccaaagtt |
| 17941 | gcttccacat tttcagttgt ctttacagca acatttcact acttggtacc agtattctga |
| 18001 | ctttgtccat tttgcattgc tttaaacgaa taccggagga tgggtcattt acaaagaaag |
| 18061 | gggtttattt ggctcacagt tctgcaagcc tgtacaagaa gcatggtgcc aggatttgct |
| 18121 | tttggtgaag gcaaggaagc ttccattcat ggcagaaagt gaaggggagc ctccatgtgc |
| 18181 | agagatcaca tggcgagaga ggaagagcgt gagaggaggg gaaggtacca tggtcttttt |
| 18241 | aacagaggta caggcttttg agggaactaa cagattgaga actcgctcac tcccacccct |
| 18301 | gccagggagg tcattaatct attcatgagg gatccaccca cataacacac acatctcact |
| 18361 | aggccccacc tccaacattg ggatcaaatt tcaacatgaa gtttgggagg gcgaacatcc |
| 18421 | aaagtacagc accttgtttc ttgttgtttt ctaatatttg ttctttatcc caggaaatgg |
| 18481 | ggggtaggaa ggtgagttct tggtgtactc taagcagtca tgctcagcct gtactatcaa |
| 18541 | attttattcc atttattctt ctgttgaggc ttgcatgact tccctaaggt acaatggcag |
| 18601 | agatagccac atgggtagta aaatcagggg cagacagacc agctttctgc caggaattta |
| 18661 | cctcagggaa attcctcatc tttgactttc ctcgttctga cttttttttc ttttaattcc |
| 18721 | acctcctctc caaacctggc actattcctt tccgatcttt atccttgtcc ttactgtttt |
| 18781 | gaagttggct cttatgcctg tttgtctttg caatctgtct ctgcgtcgcg tgttggtagt |
| 18841 | catttatttt tgtccctagt catgattccc agaaccttgc tgtggtcatt ttgatgcccc |
| 18901 | accctttgac tattacaaac caggagagct catgcaagtg gccacatgct gtagtggtta |
| 18961 | agagcacagg ccccgtagct gaacttgaaa ctcagcatga caacatgctg gctgtgtgac |
| 19021 | taaggcaaat taaatgacca ctctgtgtcc ttattttctt atacataaaa tggagctaca |
| 19081 | atagtacctc ctcataggga tgttgtgaag cttcagtgag ttaatacaga tataatgatt |
| 19141 | agttatctgc ctccattaaa tccaatcatc aatactaccc agctttatta aaacttctga |
| 19201 | cttttgtttt ggatgtggcc aggtcctgaa ctgaattgtt ttttccaggt caaatttaaa |
| 19261 | tctaccctcc tttccttttt ctcaatgcca aattgttctt cagtttccat ctctagcccc |
| 19321 | ataatctttg atttctcttg cccacatgga tggttacctt ttctgaaatg tcatagctct |
| 19381 | tacagtgcta gccacctatt ttgatgccaa atctttacac caaccagtgt tatcacttaa |
| 19441 | tcaattctta catctatgtc ttaacttctc caaccaaact taagacttgt tggtgccaag |
| 19501 | aatcaaatct catacttttg agttattcaa accatacaga acagtagata ctgaataagt |
| 19561 | atttgtctga atgaattgtt tgaataactt aaagagccta gaagcggctg ggtgcgatgg |
| 19621 | ctcatgccta taatccgagc actttgggag gctgaggcgg gccgatcacc tgaggtcagg |
| 19681 | agttcgagac cagcctgaca aatatgatga aaccccgtct gtactaaaaa tacaaaaatt |
| 19741 | agccgggcat ggtggcatgc acctgtaatc ccagctactc aggaggctga gacaggagaa |
| 19801 | tctcttgaac ccaggaggtg gaggttgcag tgagccaaga tcacaccatt gcactccagc |
| 19861 | ctgggcaata aaagcaaaac tccatctcaa aaaaaaaaaa agagcctaga agctttccag |
| 19921 | ggtggtcttg ggggtattgg ctttagaaga ggaagcttga tagatgaaaa tttccagatc |
| 19981 | aacggcattt tatgtacttc tcagaaacaa ggtatgacta gactgaaaga tctgaagtca |
| 20041 | ggaagaaact tcttggtatc agtctgtgcc cttaggaaga agtgaggtca taagctctat |
| 20101 | tagcacacat agctgaaaaa ctgaaagagg atgtaagaga aaggattgtt aaaaaacaaa |
| 20161 | aacaaaaaaa cacaaaaaac caaaaataaa aaatctgggt gaggtatttg caatactaga |
| 20221 | gccaaagaat ttgacctaag aggccgggcg tggtggttca catctgtaat cccagtactt |
| 20281 | tgggaggccg aggtgggtgg atcacttgag gccagaagtt tgaaactaac ctggccaact |
| 20341 | tgttgaaacc ccatgtctac taaatacaca caaaaaaggg cccggcgcgg tggctcgtgc |
| 20401 | ctgtaattcc agtactttgg gaggctgagg tgggaggatc acctgaggtc aggagatgga |
| 20461 | gaccatcctg gctaacatgg tgaaaccccg tctctgctaa aaatacacaa attagccggg |
| 20521 | tgtggtggca tgtgcctgaa gtcccagcta cttggagggt gaggcaggag aatcacttca |
| 20581 | acctaggagg tggaggttgc agtgagctga ggtagcgcca ctgcactcca gcctgggcga |
| 20641 | cagagcaaga ctctgtctca aaataaacaa ttaactgggt gtggtggcac acacctgtaa |
| 20701 | tctcagctgc tcctgagcct gaggtgggag aatcacttga acccgggagg cagaggttgc |
| 20761 | agtgagctga cattgtgcca ctgcgctcca gcctaggggg gagaaaaaga aaaaaaagaa |
| 20821 | ttctgatcca ggcactgact cattgagcaa gtcatcttta ctgttcaggc ctcagctttc |
| 20881 | ttcctttgtt tttttttgag acagagtctc attctattgc ccaggctgga gtgcaatggc |
| 20941 | atgatttcag ctcactgcaa cctctgccgc ccgggttcaa gcaattcttc tgcctcagcc |
| 21001 | tcccgagtag gtgggattac aggtgcctgc caccgcgccc agctaatttt tgtactttta |
| 21061 | gtagagatgg gggtttcact atcttggcca ggcbggtctc gaactcctga cctcatgatc |
| 21121 | cacccacctt ggcctcccaa agtgctggga ttacagatat gagccaccgc acccagctag |
| 21181 | gcctcagttt tctaatgtgt aaaatgaaaa tatgcactag accttcactt gtttttttct |
| 21241 | atgtgataat tttttttaaa aaaagaaggt gtcatgttac attttatctt tatgtttaca |
| 21301 | tttcatcttg taaggttgcc tttgagcctt gacacagtga tttttctcat tcaactagtt |
| 21361 | tctctcccat ctcaactagt gacctcacca tccactaatt gtttaagcca gaaattggga |
| 21421 | acttttcctt ggttcctctt ccttgtttac ttcttccatc taccccatga gcaaatccta |
| 21481 | tctgttcttc cttaaattta gttcccagat ctatctcctg catctcaggt ctatgtactt |
| 21541 | cttcccatct cccctgctac tagtctgtcc agagctacaa ccacttccct tatagattat |
| 21601 | tggaataacc ttcttattgg tcttcatatt ttcactctga ctcccctctg atcaattttc |
| 21661 | tgcaatgcag ccagaattat cttttaaaaa tgtaagtttg agccaggcac agtggctcac |
| 21721 | gcctgtaatc ccagcacttt gggaggccaa ggtgggagga tcacctgagg tcaggagttt |
| 21781 | gagatcagcc tggccaacat ggtgaaactc tgtctctact aaaaatacaa aaattagctg |
| 21841 | ggcatggtgg tgggtgcctg taatcccagc tacttgggag gctgaggcag aactgcttga |
| 21901 | acctgggagg ccatatatat ataaagtttg atcacaccac tgtcctgctt aatctttttt |
| 21961 | tattttttaa cttttaaatt ttttaagaga agggtctctc tgtgttgccc agactggtct |
| 22021 | ctaattcgtg ggctcaagag atcctctcat cttagcctcc caagtagctg ggaatacagg |
| 22081 | catgtgccac cacacccagt gactttcctt cctaaaatgc ttcaatagtt tctttttctt |
| 22141 | tttctttctt tctttttttt tttttttttg agatggagtc tcgttctttc acccaggctg |
| 22201 | gagtgcagtg gcgtgatctt ggctcactgc aacctctgcc tcccgggtta aagtgattct |
| 22261 | tctgcctcag tcttccaagt agcbgggact acagcatgtg ccaccacacc tcaataattt |
| 22321 | tttgtatttt tagtagaaat gggtttcacc atgttggtca ggcbggtctc gaacagctga |
| 22381 | gcttgtgatc cacccgcctc ggcctcccaa agtgctggga ttacaggtgt gagccactgc |
| 22441 | acccagccac ttcaatagtt tctttttgtg cttaacataa agtttaaatt catgtccaga |
| 22501 | gcctataagg tgtcatatga ccaggcccct caaggtatat ccacttcact caagccatgt |
| 22561 | ttgtctcatc ttaattcttc aaacacccca cattctttcc taactcaagg tctttgagct |
| 22621 | tgctgcttct tccaggtgga ctgatcttag cccttccctt tgttgttgat tttttaactt |
| 22681 | tttttttttt ttttttgtga gaaagtcttg ctcttgtttt ccaggctgga gtgcagtggt |
| 22741 | gcaatctcgg ctcactgcaa cctccacctc ctgggttcaa gtgagtctcc tgactcagcg |
| 22801 | tcctgagtaa ctgggattac aggcacctgc caccacaccc ggctaatttt tgtattttta |
| 22861 | gtagaaatgg ggttttgccg tgttggccag gctgatcttg aactcctgac ctcaggtgat |
| 22921 | cctcccacct cggcctccca aagtgctggg attacaggca tgagccagcg ctcccagcct |
| 22981 | ttttaccttt ttttttttta atttcaatag gtttttgggg aacaggtagt ttttggttac |
| 23041 | gtgaaaagtt ctttagttgt gatttctgag attttagcac acccatcacc tgagcagcgt |
| 23101 | acactctacc caatgtgtag ctttttatcc ttcacccccc caagtctttc cctgagttcc |
| 23161 | caaagttcat tgtatcattc ttatgccttt gcattctcgt agcttagctc ccacttacga |
| 23221 | gtgagaacat acaatatttg gttttccatt cctgagtctc caattccacc caggttgctg |
| 23281 | tgaatgccat taatatgttc ctttttatgg ctgagtagta tttcatgata tatatataca |
| 23341 | cacacacaca cacacacaca catatataca cacacacatt tatatgtgta tatatacaca |
| 23401 | tatatatata tgtcacattt ctttatccac tcattgattg atgggcattt gtagccctgc |
| 23461 | cctttgaatg gctgacttct tcttatgctt cagaattaat actttgtaat tacattaata |
| 23521 | tgtttttttt aaaaaaaaac cttttacata tatattggtc tgtcacaata atgtataaca |
| 23581 | atattatagt ttctgtttta atgacttaac tttggcaaac tggtcaatga tttcattaaa |
| 23641 | actgatcttt ttaaaaataa tcagcttcaa tagacagttt aaccagattt gtcaactttt |
| 23701 | tgtttttggc acagtctcac tctgttgccc aggatggagt gcagtggtgc catcttggct |
| 23761 | cactgcaacc tctgcctcct gggttcaagt gattctcatg cctcagcctc ccgagtagct |
| 23821 | gggattagag gcacctgcca ccatgcccag ctaagttttg aatttttagt agagataggg |
| 23881 | tttcaccatg ttcgccaggc tggtctcgaa tgcctgacct caagtgatct ggctccctcg |
| 23941 | aactcccaga gtgctgggat tacaggcgtg agccaccaca cccggtctcc ataaaaaaat |
| 24001 | cttaaacaaa aggatatggt tggtgaaata caaatcctat tgcgcagtaa ttttcacaaa |
| 24061 | ttttaaaatt gacaatacct tcgcttcttt cagatcaatt atagtggctt tcaaatgtca |
| 24121 | tcgctcaaaa aagttcaaat gtcatcgctc aaaaaaaaaa caaaccttca ctagaaaatt |
| 24181 | aatcataaat tgatggtaca gactgggtgc agtggctcac aactgtaatc ccaccacttt |
| 24241 | gggaggccga ggtggatgga tcacctgagg tcaggagttc aagaccagca tggccaacat |
| 24301 | ggtgacaccc cagctctact aaaaaaaaaa aaaaatgaaa aaattagccc ggcgtggtgg |
| 24361 | tgcatgtctg taatcccagc tacttgagag gctgagacag gagaatcgct tgaatgcaga |
| 24421 | aggcggaggt tgcagtgagt cgagatcata acactgtaat ccagcctggg caacagaggg |
| 24481 | agactcctca aaaaatataa aaataaataa attgatgtta catttggaaa aactgctgaa |
| 24541 | attttcttct tctgcaaaaa gttagaaaaa accactgaat gattgaaaac attgacatta |
| 24601 | tttaattctt tgctttagag caagtactca gttcttgatt gaagtgattg agggattcaa |
| 24661 | acattgtcct tttgttttct tccggtaacg tcagaccagc atattttgtt attgctgctg |
| 24721 | gctgttttct tcaaaatttg ctttgaaaaa gatgtaaatg gccatttcct tatacttgtg |
| 24781 | attaaatatt tgttggcctt tccaccagtt ctctgcactg atcttcaaga aaaaatttta |
| 24841 | aaacctgcac acaaaatttt aaagactgaa cacagaattt taaagcatgc acatttttca |
| 24901 | aagcbgtttc tatctctttg gaagtttgtg tctgattaag ttcatctaag acttcactcc |
| 24961 | aggaaaaaag ttaacccaga aaagataaat agcctcagca gagagaaaaa tctactgatt |
| 25021 | ttcttgtgtc tacattttgt tttagatagc ataatacttc aaaagttggt actcatttct |
| 25081 | taaactttac tgtgtgcata gcttcaaaat gaatactttg ttgtgtgtgg gaaagccttt |
| 25141 | tcattgttat acttacaatc ttcagcatgg tccatccgtg aatctttttt aaaattgata |
| 25201 | aaaaggccag gcgcgatggc tcatgcccgt aatcccagca ccttgggagg ccaaggcaag |
| 25261 | tggatcacct gaggtcagga gtttgagacc agcctggcca acatggtgaa acctcgtctc |
| 25321 | tactgaaaat acaaaaatca gcbgggtgcg ttggcgtgcg cctgtaatcc cagctactca |
| 25381 | ggaggatgag gcaggagagt ggtttaaacc tgggaggcgg aggttgcagt gagccgagat |
| 25441 | tgtgtcactg cactccagcc tgggcaacag agcgagactc cttctcaaaa aaaaaaaaaa |
| 25501 | aaatggttaa aaagatgaaa taaaaatttt ccaagttccc ctcaaccccc ctaaaaaaaa |
| 25561 | atcatacatg aagaaacatt tccaaaacag tggagtttgg agattgattt gcacaagcac |
| 25621 | aaatgaggat ttaggataaa tttctttgac ttttacctga acactacagt cagtcttggc |
| 25681 | catagtttca gcattgccat gtccttggtc atgatagagg ttcatgtcca gcatatcaca |
| 25741 | attcagtcat atggtgacta ttatgtgagt tcaggagtgt ttatcctaga aatagaaaga |
| 25801 | cacccaggaa tgactccttt ctttcaaatt tgctgttctc aaaatgaaca tacttaagga |
| 25861 | ctttacattt gatcagggta taaaccactg ggaagactaa gtgctcagaa aaagaaccaa |
| 25921 | agacttggag ataggaacag agcctgaaat gaacagaaac tattctatac cccccatgaa |
| 25981 | cctagaaaca aatgtgtata gctaagcgta ttagtccact cgggatgctt taacagaata |
| 26041 | tcaataaact ggaatgcttc acagtaaaca tttatttctc acagttctgg aggctgggaa |
| 26101 | gtccaagatc tggtatctgc tgaggttcct cttactggtt tgcagatggc cgtcttcttg |
| 26161 | ttctatcctc acatggcaga gagcagagaa cagaccatct cttgtgtctg ttcttagaag |
| 26221 | aacattaatc ctatttatga gcactctacc ttcgcaacca aaaggcttca tctccaaata |
| 26281 | ccatcacttg gagatttagc cttcaacaca ggaattttgg gggtacacaa acattcaatc |
| 26341 | catagcactg agtctgtatg tgttgggaac tgattgataa attggaattc ttcaaattaa |
| 26401 | cttacatgta gaatacagta tttattaaag gataagtaaa aagaaatgtg ttaatttata |
| 26461 | gtgtatttat tattattaaa agtctatagg gcbgggcaca gtggctcatg cctgtaatcc |
| 26521 | cagcactttg ggaggccaag gtggggtgga tcacgaggcc aggagtttca agatcagcct |
| 26581 | ggccaagatg gtaaaattcc atctctacta aaaatacaaa aattaattgg gcatggtcag |
| 26641 | gcgcacgcct gtaatcccag ctacttggga ggctgaggca ggagaactgc ttcaatgaac |
| 26701 | ccgggaggtt cattcaagat cacgccactg cacttcagcc tgggtgacag agtgagactc |
| 26761 | tgtcttaaaa aaaaaaaaaa aaaagtctac agtaactgca attgtttaga atttaagcca |
| 26821 | acaagatatg ttttcttttc cgggagttgt attttttatc actgattgtc tacaattgac |
| 26881 | agtgcatgtc aaaaagcaga cttgtcgtgc tgcagtggct cacgcctgta atcccagaac |
| 26941 | tttgagaggg cgaggcagga ggattgcttg agcccaggag ttggagacca acctgggcaa |
| 27001 | catagtgaga tcccatctct aaaaaaataa aaataaaacc actcattttt gtcaatttta |
| 27061 | ttactgcttt taatttttct aaagacgatg tgctgctcca gctctgggta cacacatgcc |
| 27121 | cacgagagca agctcatgag agaagaaact acatcccctc tatccaccta tatttctaac |
| 27181 | gccttgcaca gtagctggca catagtggac atgaaataaa tatttgtgga ataaataagt |
| 27241 | gaagaagaat tttagaatac tttataagaa acaataaatc ttcagagatc aacatttcaa |
| 27301 | attagtaact ttatttacaa acctctcttc tgggttttat tatttactac aagtgcttgc |
| 27361 | aagacctgtt attgtacact catgtattcc tatcaaaggt aatcatcaga cattatattt |
| 27421 | cattaaataa tttaatggtg ctttctgttc tttattcatt aatttttttg tgtgtgtgtg |
| 27481 | agaatggagt ttcactatgt tgcccaggct ggccttgaac tccagggttc aagtggatcc |
| 27541 | tcctgccttg gcctcccaaa gtgctgggat tacaggcatg aaccaccatg tccaacaatg |
| 27601 | ttttctgctc tttagtaagt ctagccatat taaattttat gtgttttttt tttctttttt |
| 27661 | gagactgagt ctcactctgt cacccaggct ggagtgcatt ggcgcgatct ccactcagtg |
| 27721 | caacctccgc ctcccagttt caagcaattc tcttacttca gcctcctgag tagctaggat |
| 27781 | tacaggcacg taccaccaca tctggctatt tttttttttt ttttttttga gacgaagtct |
| 27841 | cactctgttg cccgagctgg attgcagtgg catgatcttg gctcactgca acctccacct |
| 27901 | cctgggttca agtgattctc ctgcctcagc ctcctgagta gcbgggacta caggcatgtg |
| 27961 | ccaccatgcc cggctgattt ttgtatattt tttaacagag atggggtttc attatgttgg |
| 28021 | ccaggttggt ctcgaactcc tgacctcgtg atccacccac cttggcctcc cgaagtgctg |
| 28081 | ggattacaga tgtgagccac cgagcccggc ctaatttttg tgtttttggt ggagatgggg |
| 28141 | ttttaccatg ttggccaggc tggtctcgag ctccggacct caggccatcc acctacctcg |
| 28201 | gcttcccaaa gtgctaggat tacaggcgtg agccactgtg cccagctcat attacatttt |
| 28261 | aaatggaggt agaatatcaa cctgaattca ctaagagaat gcaggacaaa ttgccctgat |
| 28321 | atcctgacac aaaggtgaag caggactttt ttgtaatttg aggatttaaa agcatggttg |
| 28381 | ctccaggcca ggcgtggtgg ctcctgcctg taatcccagc actttgggaa gccgaggcag |
| 28441 | gcggatcatt tgaggtcagg agttggagac cagcctggcc aaaatggtga aaccctgtct |
| 28501 | ctactaaaaa tacaaaaatt agcbgggcgt ggtcaggcgc ctgtaatccc agctacttgg |
| 28561 | gaggctgagg caggagaatt gcttcaagga acccaggaag cagaggttgc agagcccata |
| 28621 | tcgtgccact gcactctagc ctaggtgaca gagcgagacc agcctggcca acatggtaaa |
| 28681 | accccgtttc tactaaaaat acaaaaaatt agcagggcaa gctggcgggc gcctgtaatc |
| 28741 | ccagctacac gggaggctga ggcaggagaa tggcgtgaac ccaggaggcg gagcttgcag |
| 28801 | tgagctgaga tggcgccact gcactccagc ctgggcgaca gagggagact ccatctcaaa |
| 28861 | aaaaaaaaaa aaaaaaaaag tatggttgtt ccagtcctgg gaaattgaaa tagggggtaa |
| 28921 | aaaggctggt gggtgtggta ggcagaataa ttacttcttc cctctcccaa gatgttcagg |
| 28981 | tcctattccc catcctattc cctggaacct atagctagat tgccttatgg ggcaaaagga |
| 29041 | atttttcaag tgtgactaaa tttagaatca tgagttagag agattatcct ggattatctg |
| 29101 | tgtgggttta atgtaatcac aggggtccct agaaagaaaa gagggaagca gaaaagccaa |
| 29161 | aggagatgga atgatgggag ttgagatcag tcagatttac agatgcaata ttgtttccta |
| 29221 | taaattctgt ggtgaaagaa atgctatatt gttgctggct ttgaagatgg aggaaggggc |
| 29281 | tgagagtgaa ggaatgcaag tgaccttaaa ttggaaaaga caagaaaata attggccctg |
| 29341 | tagaggttat aaaagaaggg tggtccttct gacacactga ttttagtccg atgagattga |
| 29401 | ttttgaactt ctgacttcca aaaactgtaa gacaatacat tagtgttatt gtaaaccact |
| 29461 | acatttttgg taatttgtta cagcaatagg aaacttatat agtgggccct gggatccatc |
| 29521 | tgccctagcc gtttatctaa aacaaaagat cttataggga aagcaaacaa acaaacaaaa |
| 29581 | aatacagaaa caaagcaaaa caaagcaccc ctatgctctg agcttgggcc tggtaagggc |
| 29641 | actatgagcc catgatttag catgttgctg ggaaatctcc ttccccctgt tgagttgcca |
| 29701 | gaatcgtgga agcagatggt gtgggggatt caggctcctc cactgctttt ctcagccaga |
| 29761 | cctttgagga gagcttggct gaagtcttcc aagctttatc cccttgtagc cattgttttg |
| 29821 | agccatctca aacattaagt agctcttgag ggttgaattg agtccttcct aaagacagac |
| 29881 | taaagtccta gtctccagga cctgtaaatg ttcccttatt tgtaattagg atgtttacag |
| 29941 | atgtaatcaa attaaaatga ggtcataccg gactagggtg ggctctgatc caatatggcc |
| 30001 | ggcatcctca taagaagagg agaagagaca tagacacata gggaaaagac cgtgtgatga |
| 30061 | tggcagagat tagagtgatg tgtttacaag ccaaggaatg tcaaatattg ccggcaatat |
| 30121 | cagaaactaa gaaaaaggca tggcacagat tgtctctgag agcctctcag agagtatggc |
| 30181 | cctgctgaca ccttagtttc agaggtctag catccagaac tctgagagaa cagatttgtg |
| 30241 | ttgttttaag acacccacca tgtggtaatt tattacagta gcccttaaac taacacagtg |
| 30301 | accttgtgtc ttctgccaga gggatttgat cacactggtg aggaagggtc ctggtccata |
| 30361 | ataacccaaa tttctgccag ggaagaggag attgaaaggt cccagtgatc ttggcctatt |
| 30421 | tacttgggag ctcttccaca gaacaaatga actcctgaag atgagctgct acaaggattc |
| 30481 | tgtgctttgg acagaattgc acttgtctct tccccctgct gtcactccct gactaggaaa |
| 30541 | ggtccaagct gtgaaggaat cccccccaga agagacttgt aagcattaaa gacctgtgga |
| 30601 | aaactaagag ggagggtgga tagaggagtc tggagaccga ctaaccttct gagctgctta |
| 30661 | ttgcctgaag tgggggtgga gtgggctgca aacactgttg tatttggggg acacatcaca |
| 30721 | gatgcttatt tgcaccttgg actttgtcag gacactctgg ttacagcaca actttgtgaa |
| 30781 | catggatcac aagatacttg gaaaagcagt gtttgcatta atcagattag gattagctaa |
| 30841 | aattttaatt aaagaaccag agagtacttc agaggcaagg agatgatagt tacctgggat |
| 30901 | tacttgctat ttgtgaaacc aaccagctga ccacttgtgt tgtttgtccc aaggtataat |
| 30961 | aataactaga tgtttgcata ttgtgattgt ttctgttcgg atttaatggc tgatctattt |
| 31021 | atcatattaa aagagggatc aagttcaaag atttcaatgc tctttatctt ctttctatat |
| 31081 | atgatattta tttttaaatg tccatattaa atatacatat atacacacga ttctcagaat |
| 31141 | tacgaagaat gtgcbgtgta gcattcaatt atatatataa tttttttttt gagatggagt |
| 31201 | ttccctcttg ttgcccaggc tggagtgcaa cggcatgatc tcgggtcaca gcaacctctg |
| 31261 | cctcccaggt tcaagtgatt ctcctacctc agcctcctga gtagcbggga ttacaggcat |
| 31321 | gtgccaccat gcbgggctaa ttttgtattt ttagtagaga cggggtttct ccatgttggt |
| 31381 | caggctggtc tcgaactccc aacctcaggt gatccaccgg cctctgcttc acaaagtgct |
| 31441 | gggattatag gcgtgagtca ccaagcctgg ctccaattct gtatattttt aaatgtaagt |
| 31501 | ataaagatca aagatacaaa gtatattcac atatcagttt ccatgttgtt attattatta |
| 31561 | ttatttgcca ttttaaccat ctccagatga agaaaactga atgtaaagtt aaatatctcc |
| 31621 | ttaactttta ctctatttaa aaagagactg aattatttgt gaggtaaccc agttgtagct |
| 31681 | gttctactct tctctactgc tagattttgg aagaaccaaa aaggaataaa gcaaagcatg |
| 31741 | acacagaaga gaaagcagaa ttatactgta gtagtatgct catattttat cagagtttgc |
| 31801 | ctgtactttt gctgattttt ttttctccta gcttggacat tttaaaggct tattttaaat |
| 31861 | ttatctcttc tgtattaaca ggtgagaagt ggacaaatca atgtataaaa actactatgg |
| 31921 | ctatcatcat ttagaatttt gtcttaaaag taattggatt tctggggtcc tagacacata |
| 31981 | atgattagag atcatgccac cagttctata tggagccatc tcaattcatc ctttctcaat |
| 32041 | ttatcctttc caggcatttt tcttgaaact gcctaagtac tggcgtctcc ctacgactat |
| 32101 | tatatctgaa aacacattca gttttcaaac cagctgaatt ttatgcctga ctattccttt |
| 32161 | taacttatac caatgaaaat cctttaataa attcactcac aattgctcca ctttctcaaa |
| 32221 | cagagcacaa agcatctaac aatatttctt catgattgat agcatacaca ctcttgactt |
| 32281 | catattcttc aaaatcttgg tatttttata agcattagtg cctttttttt ccccagtcag |
| 32341 | aagcactgac ggatttattc tattgggtgt tgtcttctgt ttggtcttta gcttttctta |
| 32401 | gctgtgatcg tttattgctg aataattaag ggcaattctt tcccactgaa atacttttca |
| 32461 | agttaaacat tttttcctta aatttttgcc ccaggctact tctagatcca gcgttgttcc |
| 32521 | agcttactga gcattccaga gggctaaggt ccaagttagc caaggtttta aaatgttgac |
| 32581 | catgtggacc tgaattcttt ccagttacat atttgcatac ttttaacagg agtggttatt |
| 32641 | tctcgtcaaa agacagaacg ctggaaatac cagggcaaaa ctatgtgttt ttttcttggt |
| 32701 | gatatcttga tcttagcatt ttactctctc ttcctggttt ctagcttgac ctttgtattt |
| 32761 | tagaggagag taatagagta acagtgcact gagaagcaat gggacatgac agaatagttt |
| 32821 | cagcagtgaa agtcagggaa gctggtttca accattcatt cacaagctta aaggactttg |
| 32881 | gtatctgact ttgtggatgc cactttctca tctgtaaaat aagggggttg gatcgtgtga |
| 32941 | tttataaggg gctttcttac tttctaacat tccatattct ataaagacag ttaaagtctc |
| 33001 | cagagagtaa agaatgtaga aaattcctga aatttactca gctcctttat tcctaaatat |
| 33061 | ttttgaattc tgaaattatt attattatta ttttttgaga tggagtctca ctctgctgcc |
| 33121 | caggccaaag tgcgatggca caatctcagc tcactgcaat ctctgctgcc caggttcaag |
| 33181 | tgattctcct gcctcagtct tctgagtagc tgggattaca ggcatgtgcc accatgcctg |
| 33241 | gctaactttt gtattttcag tagagaaggg gtttcaccat gttggacagg gtagtatcaa |
| 33301 | atttctgacc tcaagtgatc cacccgcctc ggcctcccaa agtgctggag ttacagccaa |
| 33361 | agcacctgac ctgaattctg agttttgatt ctgttttttt tttttttttt ttgagacaga |
| 33421 | gttttgctct tgtcacccag gctggagtgc aattgcacgt tctccgctca cagcaacctc |
| 33481 | catctcccgg gttcaagtga ttctcctgcc tcagcctccc aagtagatgg gactaccacc |
| 33541 | gtgcctagct aataattttg tgtattttag tagagatggg atttcactgt gttagccagg |
| 33601 | atggtcttga tctcttgacc tcgtgaccct ccctccttgg cctcccaaag tgctgggatt |
| 33661 | acaggcgtga gatactgcgc ccggcccata ctcacagatt tctttgtgat attatctcat |
| 33721 | ttgttttcac cacacccaga tgatgtggat ggtaggagaa atcccatgcg aataagtgga |
| 33781 | atatgttagt aactgcttcc ttgggtcctt ttgcctctgg acttaactct ttttttttga |
| 33841 | gacggagtct tgctctgtca cccatgctgg agtgcagtgg cgcaatcttg gctcactgca |
| 33901 | acctctgcct cccagattca agcaattctc ctgcctcagc ctcccgagta gctgggatta |
| 33961 | caggcatgtg ctgccacgcc tggctaattt ttttgtattt ttagtagaga tggggtttca |
| 34021 | ccatattccc caggctggtc tcaaactcct gaccttgtga tccacccacc ttgaccaccc |
| 34081 | aaagtgctgg gattagaggc atgagccact gcacctggcc tggacttaac tcttaaatga |
| 34141 | tgttacccag gaaaaccaat ctatgactaa ggcaaaaaaa aaaaaaaaaa aaaaaaaaaa |
| 34201 | aaaagttgca cagagaagag tggaaatatc agtaaatcag aagctaggca ggcctaatcc |
| 34261 | ctaatccact tggtgacctt ctgcaaaaca cctttctgtt agccttttca cccgtgaatt |
| 34321 | tttttttttt tttgagacgg agtttcgctt tggttagcca gactggagta caatggtgcg |
| 34381 | atctcagctc actgcaacct tcgccttctg ggttcaaggg attctcctgc ctcagcctcc |
| 34441 | tgagtagctg ggattacagg aacctgccat cacacccaga taatttttgt atttttagta |
| 34501 | gagatggggt ttcaccgtgt tggccaggct ggtcttgaac tcctgacctc aggtgatcca |
| 34561 | ccttcctcgg ctgcccaaag tgctgggatt acaggcgtga gtcactgtgc ctggcttact |
| 34621 | tgtgaaatta aagcttcaac ttttactcct taggaacgtc tcacaaattt ccacacataa |
| 34681 | atctaaagta gacactcctg cttgccaaaa gcatactctc taaaacattg gttctcagac |
| 34741 | ggacatagtg gctcatgcct gtaatcccag cactttggga ggccgagacg ggtggatcac |
| 34801 | ttgagatcag gagtttgaaa ccagcatggc caacatcgtg aaaccccatt tctactgaaa |
| 34861 | atacaaaaaa aattagccag gtatggtggt gcgtgcctgt aatcccagct actcgggagg |
| 34921 | ccgaagcagg agaatcactt gaacctggga ggcggaggtt gcagtgagcc agatcccgcc |
| 34981 | actgcactct agcctgggag atagagcgag actctgtctt ggaaacaaac aaacaaacaa |
| 35041 | acaaacaaaa aaattggttc ttgagcaggg caatttcacc tccaagggga catttgacaa |
| 35101 | tggcbgggga catttttggt tgtcacatct ggggttgggg agtgaagtgc tattggcatc |
| 35161 | taatacgtag aggccaggga tgctgctgaa catcctgcag tgcacaggac agcccctgac |
| 35221 | agcattaaac agtccaaaat gtcaattgtt ttttgaggtt gagaaacgct ggtctaaaag |
| 35281 | aaatgacagg acaggtggct tggctcatgc ctatcatccc agcactttgg gaggctgagg |
| 35341 | cgagtggatc acctgaggcc agtagcttga gaccagcctg gccaacatgg tgaaacctct |
| 35401 | tctctactaa aaatacaaac aatagccggg cgtggtggcc cacacctgta atcccagcta |
| 35461 | ttcagaaggc caaggcagga gaatcgcttg aacccggggg gcaaagattg cagtgagcta |
| 35521 | agatcatgcc actgcactcc agcctgggtg acagagtgag actctcaaaa aaacaaacaa |
| 35581 | acaaaaaaac agaaatgact caaatgttta cagtgattac ttctggatgg gattatgata |
| 35641 | attgtttctc tactgttcta aaaaactttc tgttctttcc aaatgtttaa tattgagcac |
| 35701 | ttattttaca atcattaaac aaagaaatga caacaactgt taaaaaaaaa ttcttaagaa |
| 35761 | ctgaaaggca aacaccacca ccactaaagc catgtccccc agatctaggt tgtgagtcac |
| 35821 | atgataccga cttcagaggc agcatgtctc aaggcctctc caatgtgtgt cagggacagc |
| 35881 | agtgggagta gggccctctg agtcagcctc tttgacctgg gatgctgcag gagatcttag |
| 35941 | caaacattca agattttcac tgagtcattt gcctgtggca ttgatctgct cactcaagtc |
| 36001 | ttccggtgtt ttggtgtgag ggaggctaaa gaggaaaaac agcbgtttag tttctcattg |
| 36061 | atttgtattg tcattgagca atacctggag cccaagtgga tgtcttttat tctgtggcct |
| 36121 | ccacagctgg gtcagtgtgg aaggcttcag accatgagaa attgttcctg ggagtcaatt |
| 36181 | attttaataa gtgagatatc agagtatatt cacagaaaga ggcttccctg gcactgtaag |
| 36241 | ggcagccagg aataaaataa aaatgcttct tcagtgaaga taattgtcca aattgaagac |
| 36301 | ataggaaata tttctaattt gcctgtgtat ttggtgaaca tttctctctc tctctctctt |
| 36361 | tctctctttc tctctctctc tctctttctg tctccataaa tgaagacatg ggaaaatcta |
| 36421 | ttaaaaatta aattaaaatg caacactttt acataaacaa aattcccaat cactctcctt |
| 36481 | actttacctc agcccaacca aatgtgagtt aaatctcttc cctttcccat gggacactag |
| 36541 | catcttggtg gcccagctca gtagctaagc atagagtaat gagtttgtta aataatttca |
| 36601 | attacattgt ttttgagatt ccagggtcac agggaaattc tgacctgaat tatctggatg |
| 36661 | aactctcaca attgtgcact gccttgttca aatttgggaa gtgctgagaa gcactcatcc |
| 36721 | aaggggtaga tctggacttc agctcatgca gcataataga atttcaggct cagtgatttc |
| 36781 | taatctgtta ccacttgcca ttttctactt gaagagggca gacaccttca ctgatctctg |
| 36841 | tttctatttc atcttttgaa aaatcgggat gataatggtt atctggttta catgctttta |
| 36901 | catgcttgtc aggagttatt ttaaagcact ttacaaatat aaaaatgtac aataaaattg |
| 36961 | cagagtcgga tgcagcaacc cctgtatcct ttgaggaatc tatcacaatt catacccctc |
| 37021 | ccaagccaac ttttctggta ctactctgga aaattgtgct tatacagtta aaatttttat |
| 37081 | tttcaaaaag ttgtgtaatt ccctttttca accatttttt tttgttataa gaaatgcaat |
| 37141 | taaaaacata cttttctttc caaatagaag agcctattct gccttataag aattgtttga |
| 37201 | aagattgaag gacaaatgaa gtcatacaac ttctctgata ccatattgaa ctcaaatgaa |
| 37261 | cacattttga ggtaagaaat gagcctggaa gatttttctt tttttttttt ttgagatgga |
| 37321 | gtcttgcttc gtcgcccagg ctggagtgca atggcgcaat cttggctcac tgcaacctcc |
| 37381 | gcctcctggg ttcaagtgat tctcctgcct cagcctcctg agtagcbggg attacaggag |
| 37441 | tgctccacca ggcctcacta attttttgta tttttagtac agatgggttt tcaccatgtt |
| 37501 | ggccaggttg gtctcagact cctgacctca tgatccaccc gccttggctt cccaaagtgc |
| 37561 | tgggattaca ggcgtgagcc actgtgcctg gcaagagata gaatttttca caaaaataac |
| 37621 | tcataccaga aactttgtag gcccccaccg atgcccataa tctttaggaa acaaactcta |
| 37681 | gtgtcaccta tttcctgata ccttctgtaa cgaccaggtc atattctgag ttcctacagc |
| 37741 | actcagtgtt tctcatcgga gctgtagcaa tggagtaata aatggcactg ctcaggaaga |
| 37801 | gagaattcag aaagaaaaga gcagggccta gaaaaggaac aaacttatcg gatgtgtaga |
| 37861 | gaaagaatct gcaaagcaag taataaaatc cagaaaaacg tggtatcatg gtggtcacaa |
| 37921 | aaaaaagagt ggttaaattt tcgaaaatgg agacaaacca ctcaccatga tcgtgccatc |
| 37981 | tgaatagaaa cacagaaatg atgacaaaaa aatggctaaa gaaagaaggt caacaaccat |
| 38041 | gtccaatgct ttggatatta agaagtgttc agatggattt agcaagtaga aagtcactga |
| 38101 | cacttggtgc acaaccagac ctcaatgtat ttaggaggaa actgttattt tggaacaatt |
| 38161 | gaaagctttc atttggctga gaaatatcaa ctcattctta aataggtatg ttagaaggag |
| 38221 | cctctgggcc tgatatctcc ttgattacaa ggaaaatgaa taatagttgc gtctgataac |
| 38281 | catgacatat cacccctatg tttgcttgta gctttcagca gctcagaaca ttgttgaaaa |
| 38341 | cactcattat cccaatatcc ccaacaggga agtgttaaaa cctgccttgt gcaactgtca |
| 38401 | atctctgatg attagataaa aacaattatg tcatgagttg tagctattgt tatttacttc |
| 38461 | ccaagagcca gattacacag gtatctgatt gctgaagcaa tgtctggatg taccacgaaa |
| 38521 | ttccacatgc atgtacagta taaacacctc tggctatcac cttatctaat tttgatcaga |
| 38581 | tacaggttaa tcccctcctg tatctttata tgtcctgaat ttgcctcatc cacctgaact |
| 38641 | ttgccataat ttactctcaa tttgtatgtg tctgtgatgg agttgttgtc attttccttt |
| 38701 | tctttttctt ttttttgagg ccaagtctct ttctgtcacc cagactggag tgcaatgacg |
| 38761 | cgatctcagc tcactgcaac ctctgcctcc cgggttcaag taattcccct gcctcagcct |
| 38821 | cctaaatagc tgggactaca ggtgcatgcc accatgcctg gctaactttt tgtattttta |
| 38881 | gtagagacgg ggttttaccg tgttagccag gatggtctct tgatccgccc gcctccgcct |
| 38941 | cccaaagtgc tgggattaca ggcatgagcc accgcgcccg gcctcatttt ctctatctgt |
| 39001 | ctgcttaatc aggttttgca agtttcacat ttcctcaact aaacttcatt ttaccaccca |
| 39061 | agcaaacttc attataatta ttttattttt ctgatgacat cagatttctg taggggtacc |
| 39121 | tattagctag agatacttag attttatttt cccagcatgt gactatttcc cattctatac |
| 39181 | aacacaatgg caagagcagg agtatgtttt tggacaatta aagagagaaa aggccgggcg |
| 39241 | cggtggccca tgcctgtaat cccagcactt tgggaggctg aggtgggcag atcatgaggt |
| 39301 | caggagatca ggagattgag accatcctgg ctaacacggt gaaaccccat ctctactaaa |
| 39361 | aatgcaaaaa attagccggg cgtggtggtg ggcacctgta gtcccagcta ctctggaggg |
| 39421 | tgaggcagaa tggcgtgaac ccgggaggca cagcttgcag tgagccgaga tcgtgccact |
| 39481 | gcactccagc ctgggcggca gagcgagact ccgtctcaaa aaaaaaaaaa aaaaaaaaaa |
| 39541 | gagagagaga aaataactca gcttcattta gatttctatt attcttctct gatccatata |
| 39601 | gtggatgttc acagaagtgt aggaaccaaa actatgcaag ttaaactgtt aattttagaa |
| 39661 | gtttatagca gtgatgtgga aggctgacca aagttggcgc tttggtctca ctataagcca |
| 39721 | tagtaataaa tacattaaca atgtccacaa acaacagtag acaccattta gtaagggctt |
| 39781 | gctccaagcc aggcactgtt ttcagcttaa gtctcacagc cttgtgaagt agattctgtc |
| 39841 | ccatcttaga gcaagttggt ctgaggatcc tcaagggtaa ggtctcttgc caaaggtcag |
| 39901 | cagaggtagt gagttcagaa ctgggattta aatccaggct gttctatttc tattccacaa |
| 39961 | ttctgcctca actgcttctc tacattttag gcacacgttt gaatactgaa aatttgggtc |
| 40021 | acagagttgg agatgtttct tcttctaggc cccaaaccgg agcggggtgc agtggctcaa |
| 40081 | gcctgtaatc cgcactactt gggaagctga ggcgggagga tcgcttgagc tcaggagttt |
| 40141 | gaagatacag tcagctatga tcctgccact gcactctagc ctgggcaaca gaacaagatc |
| 40201 | ctatctctaa aaaaaaaaaa aaattaaaat tttaacacaa gggcccaaac aagtcaacag |
| 40261 | taattacaac atgatcttta ctactgtcta ataacatctc acagtgcttt aaacatacgt |
| 40321 | agttaccatt ctgtccactt ggttgcctgt aatattaact cagtaagtag gaatacttcc |
| 40381 | tgccctgact aatatactca taaatatatg ctctaagtca agggtcttgc aggttctgat |
| 40441 | ttaaaaaaca caattttttt gagggtcact ggctttacat tatctcattc ttttcaagtt |
| 40501 | cctttgtacg taaaacatcc tatgctcagt tatatgatct gttcaacctc ctgcttgaca |
| 40561 | gatatgaaaa cagtgctctc atgtaattta tgtaatttac atttttacat atttagcagt |
| 40621 | acacctttgt gctatgttat attgtttgag aactaatctg tttttctgat ggctggaagt |
| 40681 | ctaagtgaaa agattataca tgaaaataat tcatgtttat tatcactagg agaaagtaag |
| 40741 | acaatttagt ttgattcaca agcatttgaa tccctattgt gtcagacatt gtattggaaa |
| 40801 | ctggggatac aaggaagata taacctcatc tctcagagtt ccctagttat cccatacata |
| 40861 | tatacaatta ttatttgtca attaaatttt ttttaaaaat ttagaaagga gtttccaagt |
| 40921 | aagaaaaatc atagcgaaat ggtataattg gtataataac agttaattag ctatagtatg |
| 40981 | aaaatacaga ggaagatcta actaagttgg ggattattaa agaaaattta aattagctgg |
| 41041 | gtgtggcggc agacgcctgt aaccccagct acttgggagg ctgaggcagg agaattgctt |
| 41101 | gaactcaggt ggtggaggtt gcagtgagat gagatcactg ggtaacagaa caagactccg |
| 41161 | tctcaaataa aataaaataa aaaataaaga aaattggaca gagatgtggc atttgaactg |
| 41221 | tctttcagat taagaagaaa gttactagtt agccaattca aatataagat ttacaaacat |
| 41281 | agagtacagc atgagcaaag gtgtggaggt acaaaaagaa taatgttttt gaggggagaa |
| 41341 | tagcaagtac tctgggggtg gccaaagttt gagttgtgtg gttttggtgg tggatggaga |
| 41401 | tgcaggaaga ttaggaagta gattgagatc agattgagaa aggtcttcca gaccagatga |
| 41461 | aaaattttgc catatttagg caatagggag ccccagaaat tgttcaacca tcatcagctt |
| 41521 | tacatttcac tatggtaatt tggcttcata agaagcatgg gttggagatt gataagagca |
| 41581 | gactccaagg ggccaattca ttaaactcaa ctgccaataa tgcaagagac aatgaaagcc |
| 41641 | agaatgaaca cagtgaccat ggatgccaga ggcatttcta ggatttttgt agaggactta |
| 41701 | agagaccatt tgggagggga ggaaggcaga agataagggg aaagaaggag ttgatatctt |
| 41761 | tgatgactga tggcactttt gctaagatga agaataaatg gtagcaagaa taaattgact |
| 41821 | gggcgcagtg gctcatgcct gtaatccaac cattttggga ggctgagatg ggtggatcac |
| 41881 | ctgaggccag gagctcgaga ccagcctggc caacatggtg aaaccccatc tctactaaaa |
| 41941 | ataaaaaaaa ttagcbgggc atggtggcgg gtgcctgtaa tcccagctat tcgggaggct |
| 42001 | gaggcaggag aatcgcttga acctcgaagg tggaggctgc agtgaacgag atcaagttat |
| 42061 | tgcattccag cctggacaac aggagcaaaa ctctggctca aaaaaaaaaa aaaaaaaaaa |
| 42121 | aaagtataaa ttgggggagg ggaggagata taggattcct attggaatgt attgagtttg |
| 42181 | agattccagc ctggacatat ggcactcttg aattgtttcc taggcgatca tatcactgtc |
| 42241 | ttgatgatat ctttaatcac acatatcact tgtggggaaa gaagaaactt caagagtttt |
| 42301 | acacaccaat cctttacttt gccatctaga caaattatat ttttaccaat gccatttttt |
| 42361 | gttgttattt tgtgggttct gcttaaaact tcccctatat ttttctaatt atggtaacct |
| 42421 | agggaaaaca tcaaattatg ttgataaaat tggctacaat ctggctctaa tgataatagc |
| 42481 | ttagaatcat gaagcagcaa tattttatcc tgagagcaaa caaactttat cctgaacaca |
| 42541 | tgtgttcttt tgccttattc atctaatatt acttgaaact tttatttttc cactttgaat |
| 42601 | agtagattct gccaagtgtt ttaaaagctt ttctcttttt aggggaggag gggaacagct |
| 42661 | tttctccctt ttgtctgata actgaggagt gaagatttaa ttggtgagaa aaatatacac |
| 42721 | actataaacc tcagaatgtt cccactgctt ttaatgtttg atgtgcctga cagattaccc |
| 42781 | tttcaaaaca gataatagga taggtggtgc tggaaaaaaa cttttccatc caagacaaaa |
| 42841 | ccacatggac attgaaaaga actggcattt gcctagacat ttagtggggg acatgtcctt |
| 42901 | agggcacaga ttccatagtg aaaggctctt ctcccccttc cacacactcc agctctctct |
| 42961 | agaaggtata atggaaagaa ctctgagcaa gaatcaggaa gttggccttt gttcctgact |
| 43021 | gtgccacttt gtggaactgg gcagaactta cctcattctg tgctttagca gcttcatttg |
| 43081 | caaaaattaa tgattacctc aaatgatttc tgattttagc caaaattaaa tacagtagtt |
| 43141 | ttaaaacaac tgctacatat taactactta cgtatgtaat tttgcactca aaataaatta |
| 43201 | tattatggaa aagaaactca acctatgtta accatccctg tactgatgag gaaactaaga |
| 43261 | cttaggaaaa agaagtgatt tactcagtat tgggcagtta gtgagcattt ttgagccaag |
| 43321 | gtcttacttt aaccagagac ctttgcataa tattgtactg ttactaaaca ctttctatta |
| 43381 | tttgactaga ggaacacaac atattgatgc atttgaaaca ataaaataat aaatattttt |
| 43441 | ccttaccctc ggcagaaaca ggatgatgag aaacattgac taaaaattta atcaagcctt |
| 43501 | aaggacaaat agtatcacag ttttgaatag gagattgggt accttggaag taattatgaa |
| 43561 | gaggtgtttt aactcagcag taggctcttt cttattcctg ctaggaatga agaagcacaa |
| 43621 | attgaaagtg aagaaggagg aaataaaaca ctgactctat gtgtaagaaa ggtgacttgc |
| 43681 | aaattatgag gcagttagga aaatgtttat tttttcttat tttataggct gtatatattt |
| 43741 | gagaattaat aattgtcctt tggagggtgt gtgtgtatgt gtatgttgga gctttgtgtg |
| 43801 | tgttttagtc cattttccta ctgctatgtg aagaaatgcc cgagacggta atttataaag |
| 43861 | aaaaagaggt ttaacggact caccgttcca catggctgtg gaggcctcac aatcatggtg |
| 43921 | gaaggtgaag gaggagcaaa ggcacatctt acatggtggc aggcaagagc gtgtgtgcag |
| 43981 | gggaattgcc ctttataaaa ccatcggatc tcacgagact tattcactat cacaaggaca |
| 44041 | gcatgggaaa aacttatccc catgattcaa ttacctccca ccagctcccc tcaagacaca |
| 44101 | tggggattat gggagctaca attcaagatg agatttgggt ggggacacag ccaaactgta |
| 44161 | tcagtatgcc tgtgtgtatg catgtgcacg tatataaatt ttttcactag tgactgatgg |
| 44221 | accatctata aaataaacaa aagagaagag acagggtctc actttgcctc ctaggctgga |
| 44281 | atacaatggc atgaccatag ctcattgcag cctctaattc ctgggctcaa gtgatcctcc |
| 44341 | cttctgagta gcbgggatta caggcacgtg ccattatgcc caactaatgt tttgtttgtt |
| 44401 | tgttgtggag atgggagatg ggagtactgc tatgttactc aggctggtct tgaactcact |
| 44461 | cctggcctta agtgatcctc tggctttagc atcctaaacc actacaatct taaaaaggac |
| 44521 | cagtttcctg gattacctct ctccctccat catccactat ctgccgtcaa ctctatagag |
| 44581 | tcaagggcta tccctgcctt ttcaatagaa gccctcaaga agtcactcca tagggactat |
| 44641 | cttgggcttt gggaagtgta cagggttggg gtgggtggga aggtgaggag gaaaggccac |
| 44701 | tgtttcaggt ggggttggag ggagatggaa aatggaccac agaggttcag agaacaggcc |
| 44761 | ctttgtggaa agggggagac caaataatgc tgcgttgtga aaggtgaaac aggctgcaaa |
| 44821 | cagaaggagc ccacaggaag ccctgctctg agcagctgaa cattctgggg tcctcagact |
| 44881 | ccgataaaaa agcacattta gcctacagct ttatgccctt cctcctaccc ttgtggactc |
| 44941 | tgccacagac atgccctcca gattgattct atccacttgt ctctagtcta ctgctactat |
| 45001 | tttagtctaa ggccttctcc ccgctttcct gggttatggt cacagactcc tatctgagtt |
| 45061 | cccagcacca ggtgcccagt tgttttcatc tcttaacaca ttccacatat tatagcaaga |
| 45121 | gagatctttc tcaaatgcaa atcagacctt gttgcatccc aatctcaacc cctttagttg |
| 45181 | ctcttctctt tgccctcatg gtcaagttca agctctctag tgtgggggca gatgttcctt |
| 45241 | tataattttt ctgcttatgt ctcctgcctc aggcctcaca attctccacc tcacagatga |
| 45301 | tgtctcagcc atgatgagtt cctctcaaat cctttaggtt tcagagatgt catttcccct |
| 45361 | gggaacattt tcctgactcc tcgttccaag catatgtctg tctttatgtt cccatagcac |
| 45421 | ctgatcattg gatcatggta gggtttatca cggtctcgta tttgtctgct tacttgtctg |
| 45481 | tattcttcac ttctcaaata tgtcttcttt gttcatcact gtaactcctt tccccagaat |
| 45541 | gttctcagat atttacaccc atcttccccc tctgtgaagg gaataaatgg atatataaca |
| 45601 | ctgtattagt ccattctcat gccactatga agaaatatcc aagactgggt aatttataaa |
| 45661 | gaaaagaggt ttaaatgatt acagttctgc atggttgggg agaactcagg aaacttacaa |
| 45721 | ttatggcaga ggcacctctt cacggggtgg cgggagagag aataagtgca agtaggagaa |
| 45781 | atgccagatg cttctaaaac tatcagatct catgagactc actcactatc acaagaacag |
| 45841 | cacgggggaa accgcccccc atgatccgat tgcctctacc tggttccacc ctagacatgg |
| 45901 | tgattatggg aattaaaatc caaggtgaaa ttttggtggg gatacagagc caaaccatat |
| 45961 | taagcaccat cctcaaaata gccttccagc tgaagacagc taaggcactc atgtagtctt |
| 46021 | attttgtctc agacaaataa ttttaccttt gaatcattgt tcattaatct agattttaac |
| 46081 | ctgaggccct aaaaattgtt tatcatcttc tgggagatct tactcctaga tggtgtttta |
| 46141 | ttccacaggt taaatttaaa cttgggccaa atctccatcc ttgtggcctg tgagtactga |
| 46201 | atttgggact gaaagcctgg gactaactgg aagtgtggaa aaggaggagg gtgtggcgct |
| 46261 | gccctcaatg attttttttt ttttttagga tttctggtgg aaaaggagag acactcagga |
| 46321 | atccccagat aaacatggtt tagcttttgt agtcagatcc tttccccaaa tttactgctt |
| 46381 | ctttctccac cacttctcaa ccccccaaac tgaacttgcc tcttcaacac actcccttgt |
| 46441 | gccctataga cagtcacaag cttgacctat agagagcatg tatttcttga ggcaacgaag |
| 46501 | gtaggaaacc ctattctaaa atgtttctta cacttttggc tctgtctaaa ttctccattt |
| 46561 | ttcaattaaa atggaaacga gattagaatt ctattctagt tatgaatata atcagaacac |
| 46621 | aataaagcag aaagattgct tcaggctctt ctgttaacgt tacatttatt caacaactct |
| 46681 | ttatggggac ttgctatgag tgaggcacca ggctaggcac cgcagctaca aaggtgaaga |
| 46741 | gaacataggc tcttcttcaa agaaacttac actgtaagct ttatagttat gaaatcatga |
| 46801 | ttgcttacct taaatgttct tgacctacat tcttagatat tttgagtctt gagaaatttg |
| 46861 | tttatttttt tcattattat acaatgtcaa ttagctcagt ggaatccaag atgttcggct |
| 46921 | agccttctga tccaagatag tggaccaaac atttgtattt actcattgtg cccctccata |
| 46981 | cttctctgaa ataaaagtgt agatcttcaa aattaaacat atctataaag caaagggaac |
| 47041 | agaaggggac attatcagca gattagacat tccaaaaatt ttttagaaaa taaaagctaa |
| 47101 | attgaatagt aagacacgga attattagat gtgtttggaa aaccaacagc atgaacaaga |
| 47161 | taatccaaga aaaacaagtt gtcccttggt gaaaatggaa ggaatttgag aaatatagaa |
| 47221 | gtgaactaaa caataaatac agtcatccct tggtatctgt tggggactga ttccaggacc |
| 47281 | tccctcagat accaaaattt ggatgcccaa gtctctgata taaaatggta cagtatttgc |
| 47341 | atacagccta tgcacatcct actgtatact ttaaatcatc tttagattac ttataatacc |
| 47401 | taatacaatg taaatgcttt gtaaatactt gttatattgt attgtttagg gaataatgag |
| 47461 | aggaaaaaaa gtctgttcat gttcagtaca gatgcaactt tttttttttc cagaatcttt |
| 47521 | ttaacctatg gttggttgga atccacaaat gtagaacccg gctacagaga gctgactgta |
| 47581 | attaaaacca acagcttcta tttggtatac tgaaagagaa ttgggaaatc attaaatcca |
| 47641 | taaaataaga acaggatgga gtgaaaaaag ctggactctg tgacgaaatg gacatatgta |
| 47701 | tggataagaa tcaggaaagt tttcataaag gaagtgccaa actgagctag ttggccaaat |
| 47761 | gaactattct ccaggtggat ggggcagggc atttaggcag aggaagcaac aaagcacaga |
| 47821 | gtgaagccca ggaaactaca ggtagctgca gggagatgac ggggctacag tgtgcatgga |
| 47881 | gagaggccaa catggtgagg taggcaggag gagctcctga agggctccaa cctgggaagc |
| 47941 | caggctaaag agatggcatt ctatcttgtc agtaataaga agcattgaca ttttgtagag |
| 48001 | atgatgaatt gaggaaggga tttatgtggt catttgtggt tctggctgat ccccctgagt |
| 48061 | gctgtctgct agaaggattc caagggttaa gtcctgaggc gtgaagaaga accgatctgt |
| 48121 | aagatagctt aactaaggtg gtagcattgg gataagggtg tggggtgtgt gtgtgagggg |
| 48181 | gatacaaagt tattaaggtg gtagaattga tggcaacatt catcttgaca gagaatacag |
| 48241 | gatgaggagc agatttcaga ggaatataat gagccctttt ttagatcttt gtgaatgttc |
| 48301 | agaaatggca gcbggtgttg cataattgca aaattagggc ttagttagtt attggcttct |
| 48361 | gagaacgtaa ctgcagtttt tttctttccc tctgccccac tctttgaaag ggggtggggc |
| 48421 | tcaaagagta gtgtgtgtgt gtgtgtgtgt gtgtgtgtgt gtgtggtaaa tacttatata |
| 48481 | caaatttctt tagatttttc tttatctcct tcactccttt tcaacatttt ggctggttgt |
| 48541 | tctgatatta ccaaggtaat ccacaattat ggcaaatatt caaacaaaac aaattataga |
| 48601 | aagtccagaa aaaaaaactc tgaaatacct tttccagaga ccaccatcat gaacagtttg |
| 48661 | gtctacagaa ttacaaatct tttgaagtat atagtatatt cttttatgtg gccattcatt |
| 48721 | atattttatg ggatcttagt attattgctt ttaaattcat ttcttatatt ttaaatttga |
| 48781 | aatacttcaa aatatgcaga aaagtagaga aaataacatt aacaccatat acttaccatg |
| 48841 | tagatttaag agaaatctac actttgccaa atttcctttt tttttttttt tttttttttt |
| 48901 | ttttttgaga cagagtcttg ctctgtcacc caggctggag tgcagtggtg cgatctcggc |
| 48961 | ttactgcaac ctctgcctct tgggttcaag caattctcct gcctcagcct cctgagtagc |
| 49021 | tgggattaca ggtactcacc accatgcttg gctaattttt gtatttttag tagagatggg |
| 49081 | gttttgccat gttggccagg ctggtctcga actcctgacc tcaaatgatc cacctgcctc |
| 49141 | ggcctcccaa agtgctggga ttacaggcat gagccaccgc acccgaccaa atctccattt |
| 49201 | ttgtaaataa tttttcagat atagaaaact acccaattat ggcbgggcat ggtggctcat |
| 49261 | ggctataatc ccagcacatt gggaggccaa ggcaggcgga tcatttgagg tcaggagttc |
| 49321 | gagaccagcc tggccaacat ggtgaaatcc cgcctctaca aaaaatataa aaattagccg |
| 49381 | ggcatggtgg caggtgcctg tagtcccagc tacttgggag gctgagggag gaaaatcact |
| 49441 | tgaacctggg aggcggaggt tgcagtgagc tgagatagca ccattgcact ccagactggg |
| 49501 | tgacagaaca agactctgtc tcaaaaaaaa gaaaagaaaa gtaagaaaac tacctgatta |
| 49561 | ctattacttc tctctttctc tctctctctc tgtgttctag aggtttgcag tatcctgaag |
| 49621 | ctggtgtgaa tcaacctcac gctttttttt tttttctttt tttttgaggt ggagtctcgc |
| 49681 | tctgtcgccc aggctggagt gcaatggtgc aatcttggct cactgcacct ccacctcctg |
| 49741 | ggttcaagtg attctcctgc ctcagcctcc cgagtggctg tgattacagg catacaccgc |
| 49801 | catgcccagc taattttttg tatttttagt aaagatgggg tttcaccatg ttggccaggc |
| 49861 | tggtctacaa atgtatctat ccataagcaa taccgtatat agtaatattt ttattattct |
| 49921 | attatttcta ttgaatgttt atattcatag tatcacactg tacacatcct tttgcaattt |
| 49981 | gctttcttta gaagcaacaa tatatttttg agatttatca tgttgctttg tgtagattgc |
| 50041 | ttactttttt tttttgatgg agtttccctc ttgttgctta ggctggagtg caatggcgta |
| 50101 | atctcggctc accgcaacct ctgcctcctg gattcaagag atcctcctgc ctcagcctct |
| 50161 | tgagtagctg ggattacagg catgtactac cacactcggc taattttgta tttttagtag |
| 50221 | agatgggctt tctccatgtt ggtcaagctg gtctcgaact cccaacctca ggtgatctgc |
| 50281 | ccgcctgggc ctcccaaagt gctgggatta caggtgtgag ccactgtgct tggccaatta |
| 50341 | tttacttttt aatttatttt atgatacaca atttgtctct ttatctcact ttattttttg |
| 50401 | attttttttt ttttaaacca ggatctcact tggtcaccca ggctggagtg cagtggcgtg |
| 50461 | atctcggctc actgcatccc ctgcctccca ggtgcaagca attctcctgc cttggcctcc |
| 50521 | tgagtagcta ggactatagg gtgtaccacc acatctggtt aatttttgta ttttagtaga |
| 50581 | gatggtattt tgtcatattg gccaggctgg tcttgaactg ctggcttcga gcaatttgcc |
| 50641 | cgccttggcc tccaaactct ctttattttt tagatattgt taacggtact atgggcagta |
| 50701 | tccttgaaca tctctctttg tataaatgtg aaagacattc atagacatgg gactaaagga |
| 50761 | ggtgcccata gtcaaccatg ctaggcattg acaaatggct tcctaaaggg gtaatacctg |
| 50821 | tgtacattgc cactagcaat ttgtacactt tcttgattcc tttcactctt gtcaaaactt |
| 50881 | actctttttt aaatttaaaa ttattggcca ggccatggtg gttcatgact gtaatctccc |
| 50941 | agcactttgg gaggctgagg caggtggatc acctgaaatc aggagtttga gaccagcctg |
| 51001 | gccaaacatg gtgaaaccct gtctctacta aaagtagaaa aattaactgg gcatggtggt |
| 51061 | gggtgcttgt aataccagat actcgggagg ctgaggcagg agaatcgttt gaacctggga |
| 51121 | ggtggaggct gtggtaagcc aagatcacac cattgcactc caacacaggg gacagagtga |
| 51181 | gactctgtct caaaaataaa ataaaataaa ataattgtca atattgttgg ttatgaaatg |
| 51241 | ctatctcatt attgtttaaa gaggcatttc ccttgataac tagtgaggtt gaattttgtt |
| 51301 | ttccagatgt gcatgagcca ttggtttttt tctgttatgc attttctatt catatacttt |
| 51361 | gaccacatga tatgtgcctg gtcataaccc atcaaactct tctttctctc agatacttca |
| 51421 | ctttatggaa atctttttca cgtttatccc tcaaacccag aattttgagt gtcatacctg |
| 51481 | ttctaacata aatttgagga aaatgaaggc taattcagaa taaagaacta tataagcaga |
| 51541 | tggacagtgt gttctcctct aaataggggt gctaggataa gaggcggtag gataaatgca |
| 51601 | cagcctcaaa atccaccacc cactaaagac ctcacagtac atgatgacat tagcatgctg |
| 51661 | tgccagcatt tctacctacc acgatgacct ggaatgaagg acaaaagggg caattgttaa |
| 51721 | gtcctgtgcg taaactttgg aagagaacat accttgcttt aaaccattaa gggggcaggc |
| 51781 | aatagattcc tgtacagggt ggcttagcca aaagtggctg gtcttgttct catttatatg |
| 51841 | gtttataatg attctaaatc attctcggag aaaaacagac tcatttcatc tccctttaat |
| 51901 | taggatttct gttactgcaa tattttagtg gcatttatgt caaatgtttt cttttgagaa |
| 51961 | cttctccctt ttactgtctt ttttctttta ttttaaactt ttattttagg ttagggggta |
| 52021 | catgtgaaaa ttggttacat aggtaaactc atgtcaagag ggtttgttgt acggatgatt |
| 52081 | catcacccag ggattaagct cagtactcaa tagttatctt ttctgctcct ctccctcctc |
| 52141 | ctactttcca ccctcaagta gaccccagag tctgttgttt tcttctttgt gttcataagt |
| 52201 | tctcataatt tagctcccac ttatatgtga gaacacgcag tatatgattt tctgttcctg |
| 52261 | cgttagtttg ctgatgataa tagcctccag ctccatccat gttcctgcaa aagccatgat |
| 52321 | cttgttcctt ttaatttact ttttgctatt ctgattagag agtggccatg ctccatgctc |
| 52381 | catatggata ttctttggaa acaaagcatt tttgaaatgg taggattggg gctagtaaaa |
| 52441 | gagaacagaa agaattgtga acagggtctc ctccagtaca gatggttaaa gaacacaaat |
| 52501 | agggaagtgt gatgagtgac ctccatttaa ttgggcgccc aagctcttgg ctgctccagc |
| 52561 | atgggttgcc atcctgactg atcccttggc tcagaaacag atatggtgct atcaggaaag |
| 52621 | caaggccaat atctgaatat tgcagcagag actgctccca tttcagaaag caacccagat |
| 52681 | taaagttgat gattcagttt caataaatgc ttcctttttt ataaaaggca tttaacatca |
| 52741 | ctctttcccc tggtaatatg gaattagctt ttgggatcaa ctggaaaatg tcagagggcg |
| 52801 | attgtaaaag gccacctgct aaccacagga agcbgggctg atacagaatg ccaggttaac |
| 52861 | ttaaggtcga taatggttac ttccttgtca ctttttacat gcatccttgc tctgcagtgg |
| 52921 | gggtcataag aagtaagatg catgcaaggt gaatttctag aagtcagctt ctctgagaag |
| 52981 | tattctctga ccatacattc ctactagtcc ccacatacgc tgctgatctc cccatcttca |
| 53041 | cccccattgt tgaaattgct ccctcattgt aactgttcac tcatctgtct ccaccataaa |
| 53101 | gcttaggctc ctagaaagtc aggaccagag ctagtacagt gccccatgtt cttatggaat |
| 53161 | gattttagtg ccttgagttt ggtgtggtga ccagagctgg tggccaactg tcgtgaggcc |
| 53221 | ccagtccttc tttttgtcat gctttccctc ccagcccctc cttgaccact ctttcacctc |
| 53281 | catctttcta cttatataga gacaaataat aagatgcttg tacaaagggt gtacttgtat |
| 53341 | tatcccattt gtgttgatat tccacaacag caaattaggt ttttttgttt gtttgttttt |
| 53401 | tgatggagtc ttgctctgtt gcccaggctg gagtgcaatg cgtgatctcg gctcactgca |
| 53461 | acctctgcct cccgggttca agtgattctc ctgcctcagc ctcccgagta gctaggacta |
| 53521 | caggcaccca ccaccaagcc cggctaattt ttgtattttt agtactgacg gggtttcacc |
| 53581 | atattggcca ggcbggtctt gaactcctga cctcaggtga tctgcccgcc tcggcctccc |
| 53641 | aaagtgctgg gattacacgt gtgagccact gtgcctggcc tgataaggtt taaagattaa |
| 53701 | ataccatgtc gttaaatttg caaatctctc gaataggaaa atcaggaaca atgacaacat |
| 53761 | tcggagcttc ccagaaggta acaactatgg ggagttttgt gggcatctga gagaagcaca |
| 53821 | cacacagatg gtttgccttt cattggtcca ttcttgccca gaaggcgaca ctaactgaaa |
| 53881 | caaagaagcc tcatatgaga aggacatggg gtcacagcag cttttggggt ggccctgggt |
| 53941 | ccttgatctg gtctttctct ggctcatttt gtattgctca ctttgttact tcacaatcca |
| 54001 | gggcttgtga catttttctt ctctggagtg gaaatgacag agctgcagaa cacaagtttc |
| 54061 | tgattggttc ctatgagtca ggaaagaggg ccagttgaaa ctgggctcac acacacacac |
| 54121 | acacacaaac taggctcaca tgtgttttcc catcagctaa acaagttttc agaagtacag |
| 54181 | aaataactcg ttggggaagg ggacccagga caatgacaat gtttttgatg gtaatgtctg |
| 54241 | cagaagtaag gcaggtttcc tctgtgcctg aaaagatggc accatttgag gagatggcat |
| 54301 | actcgtggtg gaatcttcat taagatgtca aactaagctg taggaaatca actctagaaa |
| 54361 | acagctctaa tgtgagaaaa catatatcca gttttataga gcaagagctg tgatcatggt |
| 54421 | gacatttaac aactgtatta gttggccaag agggtaaaaa tatacttgac ctcttagagc |
| 54481 | accataaata ctctcagctt gtgggccaac tgtgtcatgg tcttttttct agcccctcct |
| 54541 | ctttctccct tccttcttgt ctctctcctc ctctctcttc cctccccttt ctcctttctg |
| 54601 | accctctttt ctcttctcta tcttctcgaa ccttcccttc ctcctctcct ttaggtgctc |
| 54661 | agcacctctt tgattcaata aacatttacg gagctccttc ttgtgccaac gactgtacac |
| 54721 | agagcbggga tgtcaagatg aatcagttac atttcctgcc caatgccaag ggatggcttg |
| 54781 | atgggttttg accagcccct ccctggactc ccaatttctt tttttttttt ttcttttttt |
| 54841 | tttttagacg gagtcttgct ctgttgccag gctggagtgc agtggcacga tctcggctca |
| 54901 | ctgcagtctc tgtctccctc ccaacttcaa gcgattctcc tgctcagcct ctcgagtatc |
| 54961 | tgggattgca ggcatgcgcc accacaccca gctaattttt ttgtattttt agtagagaca |
| 55021 | gggtttcacc atgttggcca gggtggtctg gatctcctga cctcgtgatc cacccgcctt |
| 55081 | ggcttcccaa agtgctggga atacagtcat gagccaccgc gcccggtgcc ctggactccc |
| 55141 | aatttctacc tcctggaacg tgctttactc accagccttg gtgttattct gcaatatggc |
| 55201 | caactgggat ttttttcaat cttacagaaa ttattctcgg aaatgtttgc tatttttttt |
| 55261 | taatgaagct acagcataca atttaaggat aaataatgta cttactctgc agctattgtt |
| 55321 | tcaagtcaaa tccgctgatt actcctccaa aattcttttc ttaataaaat ctctgaccct |
| 55381 | ttcctcttcc tgttagaact tctggagcta ccattgttcc tcctcttggg ctgctcataa |
| 55441 | cctaggggag tcacagtgaa attacttgct ttaaaattct ttaatcactc tgcgagttgt |
| 55501 | taggaaaagc tgacacatct gatttggaaa ctcccactcc agtggactgt tgtgcctcag |
| 55561 | cacacaggga cgggtggagc aaaggaacaa gaagccaaaa actctcaggg cacttactat |
| 55621 | gattgtgtaa aagagagact catcaattaa cacaggtact ggcaagtgca cttcataatg |
| 55681 | cctccatttc tagacagatc aaaaacagtg tgccctgtca ataaatgctg agtttctgta |
| 55741 | gcagcctgat tgagatcagc taacctttag gccaaaagcg ggattcttcc ttgctgaagc |
| 55801 | ttttggcaaa gcatattgag cttcatgcca gggattagat taactcttgc aaaactggtt |
| 55861 | caccaggaac aatgactcag tgtttttttt ttagtatccg gcatattgtg tggagcagct |
| 55921 | ataaatatat ttacaagctg gagtttcaag ggaggggagt aatagcttgc tgaaaaacat |
| 55981 | gccaactgag ttatgggtct tcacgcagcc agcatgctgt gttttgggct ctgcctcttg |
| 56041 | taatttttag aaattaatta gtttattctt tatttatatt tatttattta tttattttca |
| 56101 | gatgggatct tactctgttg cccaggctgg agtgcagtgg tgcgatctcg gctctctgca |
| 56161 | acctccgcct cccaggttca agtgattctc ctgcctcggc ctcctgagta gctgggattt |
| 56221 | caggtatgcc tcaccatgcc tggctgattt ttgtattttt agtagaggca gggtttcacc |
| 56281 | atgttggtca ggctggactt gaactcctga cctcaagtga tccacctaag ggtactggga |
| 56341 | ttacaggcat gaaccactgc acccggcctg ttggttgtaa ttttattttc ctcctcaagg |
| 56401 | actttgagca cattatcttc tctttaataa cttgtttcca ccctcctttg tgcacgcgcg |
| 56461 | cacgcgtgtg tgtgtgtgtg tgtgtgtgtg tgtgtgtgtg tgtgtatttt ctgatctccc |
| 56521 | tacgggggca gagagtctca agcaggtatg tccatgttat taacatactg tctgcttatt |
| 56581 | aactaactgc accaatgatg aaagccaact gacaaacaag tgatgctctt atccctcctt |
| 56641 | cgcaagcaat gaatctgaaa gccaagagaa gttttccttt caacaggaag tgttttggag |
| 56701 | tccgaacaac tctgcattta gacagtgcag cttttagtta cagatcttgg caatggggca |
| 56761 | ggcagaggga gcggcaacta cagactttgc cgtaggactg ttttctatgg agtgtgtgtg |
| 56821 | ctctgacgag ctagtgacag gagggaggtt acaaaagcat ttactgaaat aaggatttct |
| 56881 | aatagaggag ctttttaaaa gtattaaata tgctaatgtg cctagggcat agtcaacaaa |
| 56941 | gagttataat acatgtcatt tttcatattt atcaaggaaa ccatgtcacc cgcagccttt |
| 57001 | ctcaatttct ggcattctga gaaacacact gtagtggtgc ctgagggtct ggggaaagaa |
| 57061 | gaatagaatg aatggggcat ctcagaatcg taaactcccc cagttgtagt tcctttcgat |
| 57121 | gttggtcgtt ggatgaattt ccagtttcta ctattgtggt tggattgggg agagtagctc |
| 57181 | aaattgggaa ttgctttttg aggatctagg gcttctggaa ttctcccagt ttctttttac |
| 57241 | ctctttatgc tatcttgtct actttgaaaa atcagtagca tccatttgat tgcagagctg |
| 57301 | aatctttcta tacagtgagg agttgtaatc acattactta taacctgctt atttaacttt |
| 57361 | ttaaaggtgc aagtcattgt aacctaagta tttactcaca ctgatcctta atatactccc |
| 57421 | ctttcttatc tgcaagcttc tttctctggt ttctcctaac tctgttactg ctcatgagtt |
| 57481 | taaaactttg tcttctcagt tcctggcttc acctgtttgg tctctgctct ccaggactct |
| 57541 | gccttggaaa tctgactcac acttctatat gtccctgggg ctcaacttcg ggcctggcgc |
| 57601 | cagaatcacc caggctccaa gcaagccttg tagactccac tcagtccttt gactcaagga |
| 57661 | aatctccact tctaaatggc tctccggttg attctgatgc cagtccaggg ttgagaacca |
| 57721 | ccgctttagc ttctagacac acagccccct cccctttttc ctggagcccc tcttgggtca |
| 57781 | tgattctatt ttccctattt ctgtactcag aagggataaa aatggaagtg tatgtgaagt |
| 57841 | tgctactacg tcccaggtgc tttaaatatg ttattttatt caatcttcac aacagtctta |
| 57901 | tgcagtctct atttttattt taagaatgag gaaaacaata cttgggtgca gtggcttatg |
| 57961 | tttgtaatcc cagcactttg ggaggccaag gtgggtagat cacttgagcc caggagttca |
| 58021 | agaccagcct gggcaacatg gcataaccct gtctctacca acaatacgaa aattagccag |
| 58081 | tctcataacc tggtctataa ataaataaat agataaaaat ttaaaaataa aataatttaa |
| 58141 | aaagaaaaga atgaggaaaa caagattcag agagccttgg tcatcttccc aaaggtgcac |
| 58201 | aattaagaaa tggctaagca ggggttctga ctcagatctg tcagcatcta cagctttgct |
| 58261 | atttaaaaga gcgtggtccg tggactagca gaatcagtgt cacctgggat cttggtagaa |
| 58321 | acacaaatac ttgagtgcca tctcagacgt actgaatcag tttcttcagg ggtagggtcc |
| 58381 | aggaatatgc attttatgaa ggcctctaaa tgtttctcaa agtttaagaa gcatggggaa |
| 58441 | ctatatcttt tcctactata tagtcttatc tctttccttg tttctttact ccaaagtatt |
| 58501 | gccttatttc tttcccagaa acctcactat cagctcactg tgcagcctta ctcatatctt |
| 58561 | cctcaaccag cagttttatt acacacaccc ttctcatttc ctcacattgc tcatggtatc |
| 58621 | tgactgagta cagggatcca acctggcttt gggttttgca ctgtcttgcc tcagtctctt |
| 58681 | aatttcttcc tatgtacatt ttaagatatt gaagacacta acttccaaac ctcttctcta |
| 58741 | aatctgacag tgaagcagtg tgtgtgtgtg tgtgtgtgtg tgcatgccag tgcatacacc |
| 58801 | acacatacaa gcacatacac agagttaagt ttggtcacat ttacttcatt aattgatata |
| 58861 | taccacaact gagaaaaact tactggcatt ctgctccaag cttgaattcc cagacgaaaa |
| 58921 | acaaacaagc aaacaaacaa ctcctcctta cacaaaaata tctagtggcc ttggaaaatt |
| 58981 | ccatttaaca ttaaattgtg tctcttcaaa gtgaagcagg gtgggcagat ttttgaacat |
| 59041 | gaatctactg ataacacaac acctcttcaa aactagaatc tcattcaggg ttaaatgatg |
| 59101 | tccaagtcaa acctgagatg ctagcatgat gccccatcct cagtcagagg tttcagggtg |
| 59161 | gcaaacaact tttgctcact ctcctctgcc tctctctata tttgcagaaa gtccagcttt |
| 59221 | cactgcaaaa gttcgataac tctgtaaaac agtttgatcc taacttcaaa agaattttta |
| 59281 | tgctatttgg aatacataaa aaatgaattt attccaatac tttagcccca taaataatgc |
| 59341 | ataatgattg gtgaaagatt agcattttgg agttcaagta cttaaagctt tcttggatgg |
| 59401 | ataatgcatc acccttaact agcataaggg gaaatagaag gttgacaagg aaaacttaat |
| 59461 | ttagggttct ttatttattt ttctctagtt atgtttacct tcccaggttg ttttattaat |
| 59521 | gccacttttc acaaggatat ttcatgaata aatatcaggt tgtatctctg gccatctgtg |
| 59581 | atgatcacgt ttttattttt aatgagttgc tcatggatta tatcctaact ggaattgcag |
| 59641 | tcagtatatt gagatgcatt gactccattt ctgtctttca ttcttctttc tcaatgtatt |
| 59701 | ctcactggat tagcactctt agccctgagg actcttgggc cagttttatt actaaaagaa |
| 59761 | gaattacagt tttgctacac agtgaccttg caagaagtat cagcacagct caatttcaaa |
| 59821 | ttctcctcaa atatcaaata tgttcttggt atattttgct tagcagttta ttgccttctc |
| 59881 | atctccactg tttttcctga gtaacagctc agaaatctat aaataaaact taataatggg |
| 59941 | gagtgactca aaagtctggt tatttttatt agtaaactat tttaggggtg aacacttcac |
| 60001 | attttacatt ctcatgctcc acagtgctga aaatagtctg aatttttttt gtgtgttagg |
| 60061 | ttgatgagaa tatttttgag atgactagca gaaaacagaa tcattaaaac agtgctatca |
| 60121 | gttttcatgt tgaataactt tacaggaaat gatagcatct ttttttcttt ttttgagacg |
| 60181 | gagtttcgct cttgttgctc aggatgaagt gcaatggcgc gatctcggct caccgcaacc |
| 60241 | tccgcctcct gggttcaagc gattcttctg cttcagcctc ccgagtagct gggattacag |
| 60301 | gcatgcgcca ccatgcctgg ctaattttgt acttttagtg gagatggggt ttctccatct |
| 60361 | tggtcaggct ggtctctaat tcccgacctc aggtgatcca cccgcctcag tctcccaaag |
| 60421 | tgctgggatt acaggcgtga gccactgtgc tcagccgata gcatcttaac aataaacatg |
| 60481 | caaagatttg taaatgttgg caaacagcaa gaaaaacata tttagaaaat tgtgctatgc |
| 60541 | tttaatgtcc tgtctgtacg ataatttact tagctcccta ccttcccccc agcccaccag |
| 60601 | aatgtttaaa ctgaaattta aagcacagtt gatcttggct tggataggca gcctgcatat |
| 60661 | taactgagga tttagttagt atccaggagc agatctactt ctcaaagtga gattcacata |
| 60721 | gcccccttgg aagctttcaa atagattgac tagcctttta aaattcctct tctccccttt |
| 60781 | cttattgccc ccgccttgtc tagctgtatg ctaacttgct gcatagaatc ctgaatttct |
| 60841 | ggatttctac atttctagct caatgaatgg ggtaaatcaa aacttaataa cactcttgat |
| 60901 | tttgaaaagc ttcagtgctt catgtaagac tttttgagaa aagatcattt tcatttattt |
| 60961 | ctgttttatt tctagcttaa tgattaaatg taagcbgttc aatacctttt tcaatatccc |
| 61021 | acttgttaaa cccacactaa acctcagaaa tattgagtca gtgatctaaa tttccattca |
| 61081 | aaatttccac aaagcagaag cataaatgtt ttcattgtca ttacaaataa acagacaggg |
| 61141 | ctgggcgcag tggttcatgc ctgtaatccc agcagtttgg gaagctgagg taggcggatc |
| 61201 | acttgaggtc aggagtttga gaccagcctg gccaacatgg tgaaacactg tctctactaa |
| 61261 | aaatacaaaa aaattagctg gattggtggt gtgtgcctgt gatcccagct actcaggagg |
| 61321 | ctgaggtagg agaatcactt gaacctggga ggcggaggtt gcaatgagct gagattgtgc |
| 61381 | cactgcactc cagcctgggt gacagagtga gacttcatct caaaaaacaa aaacaaaaac |
| 61441 | aaaaacaacc ccttcccctc cacgaaagaa aaccccaaat aaacagacaa atgaaagcaa |
| 61501 | tgaaaacagg aaaataattt tgacacctac ttctgggatg ttatgttatg ctttgcattg |
| 61561 | gttctattta ttagacatgt tcccatcttt attatttaag agcagataaa ataacctcac |
| 61621 | tacattaatc tcttttgctc tgcctctttc catatgattc ttcactagca gttcccaaaa |
| 61681 | caaaaaaatt gtgcaccaaa atcccaactg agactcaatt gtttgctgac tcaacaactc |
| 61741 | taatgagaaa tcttatacaa gagcttttgt ttcaaaagga agtgccagga aaattttgct |
| 61801 | tccctcaagc aatggcatgt tttctttttc tggacagtga gaaccatgta attaaacata |
| 61861 | ttttcctttg tgctttggct gtcaggaaac tcagagccaa acttgtagcc caagttttat |
| 61921 | ggctatgtaa gacattatgg cccatatatc tggactcttc ctttctcctt ggtattgatc |
| 61981 | ttcagtcttg gctttagttt acaaaatatg ccattataaa aaataacagt atctgtaggc |
| 62041 | tgtctgaaat tattatggaa aaagtagtgt acaaataaat gaataagtca attgtttgaa |
| 62101 | aaacaatgca tttgtatcag aaataacttt gtgagtggtc ttcaggttcc tagtctattt |
| 62161 | cattttgata tatatttctt gtgggtttac cacgtgccag acaaagatgt tcctggcagg |
| 62221 | ggggttaata atgttaacag tactcagtct ttctagtgcc ttacaggcta tagaaggaga |
| 62281 | aagaaataca aaacaaacta aaataggtat tcaattgcaa caaaagcaac ttgatgtagg |
| 62341 | ggtacagggg aaggaataat tcattctaca ggcctttaaa agataaagag gtatttcaaa |
| 62401 | ggcaaacaat ggagagaaga tcattctaag ctaaggaggt tgcatgaaga aagcataatg |
| 62461 | tcactacttt tttttttttt tttgagacag ggtctggctc tgttacccag gctgtagtgc |
| 62521 | agtgatgaga tcacaggtca ctgcaacctc caccttcagg gctcaaacca tccttccaca |
| 62581 | tcaacctccc aagtagctgg gactacagct gcatgccacc atacccagat aatttctttt |
| 62641 | attttttgtg gaaacagggt tttgccatgt tgctcaggct ggtcttgaac tcctgagctc |
| 62701 | aagtgatctg cccaccttgg cctcccaagg tgttgagatt acaggcatga gccaccgcac |
| 62761 | ccagcataat gtcatcaaat tgaagtgaga aatgggaatg tcactaccaa ccataagtaa |
| 62821 | taaacaatag attatcatta actttgctcc tagagaaaga caagtttatt tagaggtgag |
| 62881 | gcgagtagaa tttttttaag ggaacttctg ggtaatttaa caccatgatc cttctcgaat |
| 62941 | gccttacaac gtaaaaatgt agttctcctt tttcttttct tttctttttt tttttttttt |
| 63001 | ttgagacagg gtctcgcttc gttgcccagg ctggagtgca gtgacacaat cttggctcac |
| 63061 | tgcatcctcc gccgcctggg ttcaagtgat tctcctacgt cagcctcctg agtagctggg |
| 63121 | attacaggcg tgcactacca cgcctggcta atttttgaat ttttagtaga gatgaggttt |
| 63181 | tgccatgttg gccaggctgg tcttaaactc ctgacctcaa gtgatctgca cacctcgacc |
| 63241 | tcccaaagtg ctgggattac aggtgtaagc caccatgcct ggccattttt cttgataaag |
| 63301 | gggtgtcatt ggggcttctc ttactcctgt cactcatcat gggtgccatg tctttttttt |
| 63361 | ttttttttga gatggagtct tgctctgtcg cccaggctgg agtgcagtgg cgcgatcttg |
| 63421 | gctcactgca agctccacct cctgggttca cgccattctc cggccgcagc ctcctgagta |
| 63481 | gcbgggacca caggtgcctg ccaccacgcc ctgctaattt tttgtacttt tagtagagac |
| 63541 | ggggtttcag cgtgttagcc aggatggtct caatctcctg acctcgtgat ctgcccgcct |
| 63601 | cagcctccca aagtgctggg attacaggcg ggagccactg cgcctggcct gggtgccatg |
| 63661 | tcttaattga caaccacaat gaagagagga aggaaagagg aaagaataag acaatacaag |
| 63721 | aagaaaaggg aaggaaaagc caatgacaga cattaactgg attttcccac aaagagaggt |
| 63781 | catgaggatc aagagcatac agaagtttgc aaaataaaga gtttctctgg cttggagttg |
| 63841 | accaaaataa gagaaaggtg aagcgagtat aatgtacgga gacttctcct gggagaagtt |
| 63901 | gtcagtggag aagttattgg gtcatatagt gatggtgtgc agataggacc tggtggtgag |
| 63961 | ttgacgagga gccattgcca ttcagccatc aagaatcatg atgtgtgttg tgtaggaatg |
| 64021 | gagaggtgag tgtggagtgg atggggcgta gatggagaag caggaggatt cgtcatgcac |
| 64081 | cctgaggctt gccagtattg atgtcagact tcctccgacc gtgttgccac cctggactgt |
| 64141 | ttgactttgg tagctatttt aaaacagcaa gaagagctgc ttgagaagaa cctgggggag |
| 64201 | atttcacaac cagcagctgc atcgaatctc cctggatgtg tgcttttgga aacaatttac |
| 64261 | acaagggctg atttcaacat gcactaatat atacagttta gctggcattt tatatggaaa |
| 64321 | ctttaataaa atggttctaa ttagtgctta atttacatag attagagagt tctacaggcc |
| 64381 | cacacagtag ggcttgggga ttttatgtca tttgatggag atgccagttt gattcagata |
| 64441 | aagaaccaat tttagggaat actgctgaag tttgcccgac acaaatgaag gagttgtagc |
| 64501 | ttgcatttct tttacccact cttgttcagt ggcttgaact agctttctgt ctcttccaca |
| 64561 | agatttagga caagatggat ttctgtgtca gcatgtagta ggagagcttt gattttctag |
| 64621 | ttctgtcctg tgtggatctg tatgtagctc agattccccc acaatctagg tcagagaagc |
| 64681 | tgctagcctt ggtgcaaagt tttcaaaaag gcttctattc agagagatga ataaggaaaa |
| 64741 | actcacaccc tacgtgcgaa ggttgcttaa tgagaggtgt gagatggagc tcagttgcca |
| 64801 | cttatctctg tagttgggta ccgttgtgca gtctgtgcac tgcccagcca tttgcagtga |
| 64861 | ccccaaagag gatcatctgg tcatcttgcg gggagagact gtgagttcct gccatgtcac |
| 64921 | ttggtataac atgagaaaac tcaaaactct aggcagatct ttgcacctgc cctacttttc |
| 64981 | tacctgctct cacaatcttc ttgagggtga ccagagtcca agtaactaag tgtaattcaa |
| 65041 | tgtggtgaat gatatgattg ctacacagga gtatctatta aggctttcaa aatgtaaaga |
| 65101 | ggaagtgact cattcttcct ggtggtggtg gttgcatcaa ttggtgtagt ctattgcctc |
| 65161 | tctcccatca acaagggaca tttggcaaag tctggagtgt gtcaactgtg gggtggtggt |
| 65221 | actaccggca tctagtggat agaggtcagg gatgctgctg aacattttac aatgcccagg |
| 65281 | acagccctcc cacaataaat tatctggccc aaaatatcag tagtgctgcc attgagaaat |
| 65341 | ctggttatgt aacagataac tttttttttt tttttgacat ggagtttcac tcttgttgcc |
| 65401 | caggctggag tgcaatggct tgatctcgac tcactgcaac ctctgcctcc tgggttcaag |
| 65461 | tgattctcct gcctcagcct cctgagtagc tgggattaca ggcatgcgcc accacgccca |
| 65521 | gctaattttg tatttttaat agagacgagg ttttaccatg ttggccgggc tggtcttgaa |
| 65581 | ctcctgacct cagatgatcc acccacctcg gtctcccaaa gtgctgggat tacaggcatg |
| 65641 | agccactgtg cccagccaac agataacttt ttaaattctc agcbgtttaa cccaacaaat |
| 65701 | aattattttc ttcctcaagc tgtatgtcca gcatgggttg gcaacatagc cctgtttttc |
| 65761 | ctagtccctt caagaagtct attgatggaa gatgcatttt tatgtgggct tctaccacca |
| 65821 | ctatgagagg gggaaggaaa tttgttggat tgtaccctga attttaaaaa gcttctgccc |
| 65881 | agaattgaca tatattcttt ccaattgcat tttattggcc acaatccatc atatgaccat |
| 65941 | gcctgaattc agagggagta ggtggagaat acatttttaa tttttaattt tttttttttt |
| 66001 | tttgagacag agcctcactg tcttgcccag gctggagtgc agtggcgcca tctcggctca |
| 66061 | ctgcaacctt tgcttcccag gtttaagtga ttctcctgcc tcagcctcac aaatagccgg |
| 66121 | aattacaggc atgcaccccc atgcctggct aaggtttttc atatttttag tagaaatggg |
| 66181 | gtgtcaccat gttggccagg ctggtctcaa actcctggcc tcaagtgacc catcctcctc |
| 66241 | agccttccaa agtgctggga ttacaggtgt gagccattgt gcccagagag agtgcatttt |
| 66301 | tgtcttgtac ccagaaagag gagagagtga gaataatcat gaactaccct aatgactatc |
| 66361 | atgctgatgg taatggtggt tgtaggatgg tgtgagaatt taaagacggc ttcactcctg |
| 66421 | tcactttgct tacttactgc tgtataacaa actgccccaa acttcaggga tgaagctaac |
| 66481 | aaaaaaatca tttaatttgc tcatgaagtt gcaatttgga tagggctgtg tagaacagct |
| 66541 | cctctctata ccatggggca tcagttagga cagctcaaaa cctgggagta actcaaaggc |
| 66601 | tgggggctat aatcatctga atgcttgctc actcctgtgc tctcatgtca ggcagtggat |
| 66661 | gctggctgta gacagagacc tcagcbgtgg ctgtcagctt gaccacctac tcccagcctc |
| 66721 | tacatgtggc tgtttggctc ccttacagta tggtggctgg gttccaaggc agaaagtaaa |
| 66781 | tgctgccagt ttcttaaagt ctgtctgcaa attggcacag cattctttct accatattct |
| 66841 | attcatcaag gagttgtaga ggccaatttt aaggggaaga aaaatagacc ctatgtttca |
| 66901 | atagcaggaa ggtcaaagaa tgtggaggcc ccagaaaact gcttcccagg taagtgacag |
| 66961 | gatagaaaaa caagattttt tttttttttt ttgagacagg gttttgctct tgttgcccag |
| 67021 | gctggagtgc aatggcgtga tctcggctca ccacgacctc tgcctcctgg gttcaagtga |
| 67081 | ttctcctgcc tcagcctccc gagtagctgg gattacaggc atgcgccacc cagttaattt |
| 67141 | tgtactttta gtagagacag ggtttctcca tgttggtcag gcbggtcttg aactcccaac |
| 67201 | ctcaggtgat ccgcctgcct tggcttccca aagtgctggg attacaggtg tgagccacca |
| 67261 | tgccaggcca gaaaaacaag acttctttag gtggagtttg gggaatgagc tttctggaca |
| 67321 | agtaaacggc atgcatcaag gcacagaaac atcagagctg catttgaata aattctccta |
| 67381 | gctggtctta cctcctagct acttacttct actgttgaca tcaaccttat aaacttgcta |
| 67441 | gaggctcagt gtggggaaac aaacaaacaa agcctcatga aacgttttga tccaattaga |
| 67501 | aaatgtctat taaatacatt gtgtttcaca aatgtgaact attaatacaa tctgggtttg |
| 67561 | ttccgattta attgtctaaa attatacata attcatcttg ccaacaaatg aaattattga |
| 67621 | aaaattaaaa atatcaccac caattttttc tattaaatgt atatttttgt aatgatagct |
| 67681 | taagtttcat ctcagtttga gatttagtac actgtggcat tcactctggt tggggttcat |
| 67741 | ttggctctga gcttcaaggt tcaatttaga cttcaaagca tgtcggactt gacctgaggc |
| 67801 | acgtttttaa caatcaggtg cagtttgtaa ggttatgggt tgaggaatag cataaatggg |
| 67861 | ccatcctttt tctgattttg agaagagaat gactactaat acccaggtgt gttcttgtct |
| 67921 | ttcttgagtc aattctaaca gcattggctg tgggttataa aaccataaaa ttttacagcc |
| 67981 | aaaaacaact ttaaaggtcg tttagatgga acttcttcat tttgcagatg aggaaactga |
| 68041 | gaatcagaga caaagtgacc tcagggcatt acaacttact attactatat tgaaagagga |
| 68101 | agggaagctg gtgcaagttg agggacccac tgatgaactg cagggtatcc aatgttgccc |
| 68161 | ctgtgtttgg gctgagggag aagcagcttc ttagcttctg ctatgctgac ttatcttgtg |
| 68221 | atctctgtcc cagcccttgg ctgcctctcc tccttgtccc caggcctgca ccattccatc |
| 68281 | tgcctcctga ttattcactg acagctgcct tttccctcac cctttgttct cagtttttaa |
| 68341 | aaatccaatg gggagaagct tggattcaaa tgatagcatt ttcagctcat gaaaaattct |
| 68401 | ataacaagtg tatttgaccg tttgatctct ggcttctccc acacacttgc cctttatact |
| 68461 | ctgacagcca taagcttcat ttccttgaag cagattgcaa tttcaatgga aaggaaataa |
| 68521 | ttgtgtagct ttcaagctga gttcagttct aaaaaggact gagcaaagct caatcctggg |
| 68581 | ctattgtaga atcttagtca ctgaatcagg cagtgaaaga gctctctcca agcttcatgg |
| 68641 | ttatgatctt gaaaaacacc agagctaggt tcaaattcca gccataccat ttcctaactg |
| 68701 | tgtgattttg gcaaatcaca caaatactta aaattctttc gactcggttt cctcttctgt |
| 68761 | aaaatgggaa cactaattaa tgctcacctc aaaaggttgt tcattcattc aacacatatt |
| 68821 | cgttgggtgc ctcctgtgtg tcaaactgtt tcagtccagt gaggaagatg gacatgaatc |
| 68881 | caagagtcac caaaaaaatg taaagtggca cctgtgatga gtcacaaagg ggaggtatat |
| 68941 | gagaaagtgt gtgacagtat ctaacaggtg agggcattat ataatttatt gttgcaaaca |
| 69001 | ggacattttt gagcatgtaa gagggtgtgt taattgtcct ggaacaacag gcataaatca |
| 69061 | ggactttctg ggcaaactca ggccctaccc cactcttacc tacccttagt ataagaggga |
| 69121 | aggttgggaa aggctttcct ggggaaggga agaagaaact gagatccgcg gaataagtga |
| 69181 | ggattcctag gcaaaaagag gaagacagag tggtttaggc caagagagca aacagtggtg |
| 69241 | caagactcta aggcaggaca aagcatggag cctgcagaga acagacagaa ggtcagtgtg |
| 69301 | atgaagatgg gaggggtgcg tggctttaaa cacaggcccc ttgcttgttg gtttgccctg |
| 69361 | taggtgttaa gaaatgaggc tatatcaagg tgaattttaa gtagaggtgg cacctctact |
| 69421 | taagaccaga cttgcagctt taaacatcag tctggctgca aggcagaatg gattagcatt |
| 69481 | gagtagtagt tctggccttg gctttccaga ggaaacttct aaacaatatc aaagccttgg |
| 69541 | tgtcacccac agagatcctg atttaattag tttaggttgg ctcccagtag gttataaagt |
| 69601 | gtgtcaggat tgagattcac tgtagaagga agtgtgaata tggagaagaa taattacaag |
| 69661 | gctattgcag tagcccgggt aagaagtgat ggaataggtt catggcagtg ggtttctgaa |
| 69721 | gcagtggttc tcaaactgta gtggatttga gtatcacctg gaagtcttat ttatttatta |
| 69781 | gagatggtct cacactgttg cgtaggctag agtgcagtgg tataatcata gctcactgca |
| 69841 | accttgatca gccttcatct cctaggctca agcaatcctg ccacttcagc ttcctgagta |
| 69901 | gcbgggacta caggcatgga ccaccatggc tatttgtttg tttgttttta atagagacag |
| 69961 | ggtctcactc tgttgcccag gcbggtctca aattcctggg ctaaagcaag cctctctcct |
| 70021 | tggcctccca aagtgctggg attatagcca ctgcaccttg gcacggaaac cttgttaaaa |
| 70081 | tgcagatatc tgggtatcat tgatttagta ggtcgtggat ggggcctgag aatttgcatt |
| 70141 | tctgacaaat tacctggagg cgctagttgc tagtttagag atcacactta gcatctagtg |
| 70201 | ggtagtggtc agggatgctg gtgaatatca tacaatacac agaacagccc ttttgctgat |
| 70261 | cactgatcga gcaaaaaaac catctgatgt ggtagataac atcaacagga tttgatcagc |
| 70321 | agggtaaagg acaactccag gactcttaca gttttctgaa tttcacaact aaatgacgag |
| 70381 | tttcactatt cattgacatt caggagacag ccctacagac ctgagaagat ggtgaagtca |
| 70441 | aagctacaca tatatttgag ggttaccttt gaaacagcta agaggataca tcaagcagga |
| 70501 | acatatatgt ggaacctgga agggaagatc attacagata taaacttggg gatcattaaa |
| 70561 | gccaggaact tatcaatggc atcagtcagt tctcttttct tttactctta tcattggtgt |
| 70621 | caaagctctg gcctcttttt gttggttcca ctcaggtgcc gtgatcctcc agcctcagca |
| 70681 | ccttgcbgtg agctctcctt gggaggctgc ctctccctcc tccttcagaa tttaccccct |
| 70741 | acttctcctt tgggtcccac ctctcaggct tggtcatgtg tggcattagc aagcaggtgt |
| 70801 | gcgtgtttcc ttctgaagca caaatcaaag ccatggttat gtatctgtgg gattatttgc |
| 70861 | taaatggcca cctctcctgc tagattctaa gttgcctgca gtgactggag aacatcccta |
| 70921 | ggtatcagat gctcaatgtc ttacacttat ggaaccgtca aagacagctg ttaaatgtcc |
| 70981 | aatgggtcag ttagggagat ggtggttgtt aaaactgtga tgagttctca ggaagaggga |
| 71041 | gaagcagtta cctttgtgaa gcagttgttg gtatttactt agtaatgaga ttaaatttcc |
| 71101 | taggacagtg ggtgtgtgaa ccagcaatag cgccatctgc tggaagtaag tgatacaaca |
| 71161 | actattatct tgactaggct cagggcbgtt aaaacagtat tgctctggga gaaaagaatc |
| 71221 | atttttttta aggttaaaaa tgtgagtaaa attctttaga gtgaagatag aatttctttt |
| 71281 | gaaatggttg gaaaaattgg ataattattg aaaatagtgt tcagttttca aagaggagag |
| 71341 | aaaccttcaa gtcactgtaa ttaagagaag ttttattgaa agaacacatg gaataaggaa |
| 71401 | gttagatatc tccacccaaa accagcattt cagaaaacag aaacaggcaa aaatctggcg |
| 71461 | gagtgtggtg gctcatgcct gcaatcccag ccctttggga ggccatggtg gaaggatcgc |
| 71521 | ttgaagccag gagtttaaga atagcctggg caacatagta agatccccat tttctttttt |
| 71581 | cttttctttt cttttctttt tttcttttct tttctgagac agagtgttgc tccttttgcc |
| 71641 | caggctggag cgcaatggca tgatctcagc tcaccacaac ctcccgggtt caagaaattc |
| 71701 | tcctgccttg gcctcctgag tagcbgggat tacaggcatg caccaccaca cctggctaat |
| 71761 | ttcgtatttt tagtagagac gtggtttctc catgttggtc aggctggtct tgaacgcccg |
| 71821 | atctcaggtg atctgcccac ctcggcctcc caaagtgctg ggattacagg catgagcccc |
| 71881 | cgtgcccagc cccaagaccc ccatttctat tttaaaaaaa aaaaagaaga agaagaagga |
| 71941 | aaagaaaaga aaaatggaaa caggcgaaaa cctaggcttc tcaaagactg aagggtattt |
| 72001 | tggaactgac tggatattgc tcatctctgg ctggttgtgt tgcagcctcg ttggtggcaa |
| 72061 | gtgcagaccc tcagtcagtg acctcctttg ttgctcttcc atcaaagggc ccccttctcc |
| 72121 | tgcccaggca tggtgttact aatatggcga tggtaggggc aggggctgca tctatgacgg |
| 72181 | ggagaggtat gagagtatac tcatcattct gctgttgtct ttgttagttt gtttctaatt |
| 72241 | tctattgttg gggagaaaga taaattcttc cctaacctct tgggatcttc acctgggtct |
| 72301 | aagaattaaa tcactgtaag acaggttaac aggagaaaaa tatatgagtt ttattgattt |
| 72361 | ttacatgtac gcggagaccc tcatgagaca gcagaagacc tgaagaaatg gacaaagcag |
| 72421 | aaagctctaa taccttttag acagagaaac cataaattca tgaagagctg acaagacaaa |
| 72481 | ggggtttggg ccagtggcag taaattgtgg gaattcacta gggaggtgta aagatagagg |
| 72541 | aagataaggg atagtttaga aagtttattt gtacagctcc attgcagcat caactcccag |
| 72601 | tcaatggtga taagagttat tttcttattc tggtacaggg agggcaactt tcttaaataa |
| 72661 | atctttttgg cttacgacag gtagaagagg gcagatcaca tagccctttc cggcatctgc |
| 72721 | tgtttctcag gtgactttag ctcaaaataa tcaacatgcc acatcagcaa attttggggt |
| 72781 | gacatggcct gtttcgctat gataatggga aagaaatcag actttttaac tttgaattag |
| 72841 | aaaacacaaa ctttgactat gtcccacaat ttatgtgact gatttcatat tctatcacat |
| 72901 | ctattttata ttctctcata ttctcctcat gaattttccc ctagaatgtt gggggaattt |
| 72961 | tgaaatgact tggggggcat gctacaattc gaaaaggaga gagacatact ctccaattct |
| 73021 | ctccctgcct gcctcacaat gtgcagctct cctctgcttc ttcttcttct tttttttttt |
| 73081 | tttgagacag cgtctcactc tgtcacccag gcttgagtgc agtggcgcaa tcttggctca |
| 73141 | ctgcaagctc cgcctcccag gttcaagtga ttcttctgcc tcagccttcc gagtaggtgg |
| 73201 | tactagaggt gtgtgccacc acgcccagct aatttttgta tttttagtag agacggggtt |
| 73261 | tctttatgtt gaccaggcta gtctcgaact cctgacctca ggtgatctgc ccacctcagc |
| 73321 | ctcccaaaat gctggaatta caggtgtgag ccaacatgcc tggcctcctc tgcttctgat |
| 73381 | tcaactgctg ctaccgatag acttactgaa ggatttgaag ccaaatggta ttaattttgg |
| 73441 | tcagttactt ccctgtatct ggtgtcctca ctagacagaa cttctgtgta tggctacttc |
| 73501 | atagaccccg accagcctac atattgtttg ctctaaggtc tagtgccctc tcttatttca |
| 73561 | ctaagataca gccactgttg gtgggggagt cacataacat ggaacataat cactgtatca |
| 73621 | gttcaggtgc tcttgattca agtggattta attatgaggg aatttattcc ttacataatt |
| 73681 | actaagtcta gcattagagt ggcctgcaga tgagggttga tccagtggct cagtgatggc |
| 73741 | cagaacgctg tttacttttt ccattctgct atctatgggg ttggcttcat cctgaggttg |
| 73801 | ttttcctttc tgtcacaggt tttacatcaa tggggtaaac tagtttacat tgtggtaaca |
| 73861 | agcaactctc aacttttttt tttttttttt tttttagact gaatcttgct ctgttgccca |
| 73921 | ggctggagtg cagtggtaca gtcttggctc actgcaactt ccgcctcctg ggctcaagtg |
| 73981 | attctcctgc ttgagcttcc tgagtagctg ggattacagg catgcaccac cacgctggct |
| 74041 | aattttcgta tttttagtag agatggggtt tctttttttt ttttttttct ttttgagaca |
| 74101 | gaatcttgct ctgtcgccca ggctggagtg cagtggcgtg atctcggctc actgcaacct |
| 74161 | ctgcctcctg ggttcaagcg attcttccgc ctcagcctcc caagtagctg ggactacagg |
| 74221 | cgcatgccac cacgcccggc taatttttgt atttttagta aagacagggt ttcaccatat |
| 74281 | tgaccaggct ggtcttgaac tcctgacctc gtgatttgcc cgcctcagcc tcccaaagtg |
| 74341 | ctgggattac aggcgtgagc caccgcgccc agccaactct caactctagt agcttaagac |
| 74401 | aacaaagatt tatttcttgc tcttactgtc tgcccatctg tatcaccttc tctgcaggac |
| 74461 | ccagtttaat ggagcacaca cagaaaaagg tgctggtcac tagggccaag ggaacaatgg |
| 74521 | ctctggaagg tttttcttga acaattcagt gttccagtct tggagcaata catcttattt |
| 74581 | ctactgttaa atccatggcc agaactaatc atgttgtccc actcaccaca aagccatatg |
| 74641 | cagccccacc atgtgctcag gaaagaggaa tgggaagcat ttgatgaaca gaaataatga |
| 74701 | cttcaacaat tgggactatc agttcacagt ttcaattgta aaaaaaaaaa aaaaaaaaaa |
| 74761 | agacagaaat agaaaaagaa caattgaaag tacttgcttt ctcatccacg aaaaaagttg |
| 74821 | gtcaaagcct cttagtgtaa gtctatagca gatgatgcct gataaggaat tgtacatacc |
| 74881 | gttcttcgtg aaaaccaaga gtaccatgta tgtaacatag ttgctttggg cttcttatag |
| 74941 | cagttaagag tgtatcagca ggcctccatg gtatttgaat gttaaaagct ttcattcccc |
| 75001 | ctggaagaaa acacatagct aactaaagaa agaaaaaaga agggaaaaag aacaaagaaa |
| 75061 | aagaaccact agagtctctg aaaagagctt atgagatacc tgactgtctg cgccttctaa |
| 75121 | gtatgtacca tgaaacctta gattcctacc tcattttgtg atggtgtaga aggcacattg |
| 75181 | gccaccagca acccttgtaa atatttgcgg atttgaattt cacaaattga aacccagact |
| 75241 | gctgagggct ttgctgctaa cgtcaaagag ctggggcaac taccacaaaa ccacatgtgg |
| 75301 | gagacttttt agatgaggag ataggaaatt cctaataaga aaagtttttt tgtaaaatac |
| 75361 | tttctaatgc tggctcttta gagaagcaca ttttacatgt gcaatggtgc aaagtcctag |
| 75421 | cactaagatt tcttcactca cagaaagaaa gaatgatgca ggtgctgttc acatgcggcc |
| 75481 | ggaaccatgc ccttgccaag caggtcagcg gggcacaggg actgcgctcc tcatgatagt |
| 75541 | gcagattggc tcggaagtac tcaattctgt ggagtcacag cgccctctga cagatttcag |
| 75601 | tttctggaaa aggaagggcc cccttcaggg tacctgctgt tcaccttcca ttagattaag |
| 75661 | gttgaagagc gagtggccat ttgtaggtac tggtatgaga tgttcctagc tacccgcatg |
| 75721 | tcagccccgg gaaacggcaa catttcccac ccttcttacc ctgggtcctg agtaggaata |
| 75781 | aaagttagtg attcttaggg gcatattgag agctggcaat gatacctctc acaaatccat |
| 75841 | cccccagaga taaggggtcc cccatgcctt tgatgtattt gggagcbgtg ctgtatgtgt |
| 75901 | tctctttggc tccccagtgg agaataataa caataacaac cgcgtactaa tacaacccag |
| 75961 | atgtcagcac agaccctctg ttctctgtct tccctgagat atctgtatct tctcagggat |
| 76021 | tactgtcggt tcaggcctgg ctcctgcttt cagcttgtgg gaaaactcac tccatcttca |
| 76081 | ttccataacc tcacatctcc tatgccagtt cccttctctg tgctccatgc tgaaccaaat |
| 76141 | gccacactca tcccctttgc tttgaattat atgaaaaaaa gaaaaaaccc tcatggggac |
| 76201 | tttatgtgta acagtcttca ctgcacattt gataacacag atgggggttt atatcctagc |
| 76261 | agagcagata ttgtcaatgg aaaatggaaa caaaacaaaa cacaaaagac aatcttcagc |
| 76321 | catcactatg tagcttggct atcatctttt gctttctcct ttacttctgg agtcccccca |
| 76381 | cataccctca gaaatggaga tagactctac atcaatctct gctctgggaa atctactcac |
| 76441 | atatccaaag gcaaactaac aagctcttgc tccgacaacc catcgacttg gggtctcatc |
| 76501 | cctccctgcc taccagtctc tgtgactgaa aggggcccat acagagactt attttcccag |
| 76561 | gaacgtgaat gatatccttc tcctgttcct tgaccttggg aggcagattt gattatggtc |
| 76621 | agctttgatt caaagtaagt tttttttttt ttctccctta ggagaatgtt gtgaggtgct |
| 76681 | gattgttctc tgcttcataa tcgtatcact tattactgat aatctttttc tgcccccaga |
| 76741 | ggttgctgaa gaatgtagca tatacagtgg acacagagcc ctgataatac aattactaaa |
| 76801 | ttctccaagg ttgagggcct ggtcttaggt catgagatta ctgatccttg ccttctgcct |
| 76861 | gctaggaagg cccaactaat ttcacagtct ttatcagtga accatagtaa agggggacca |
| 76921 | gaagagaaaa aggttatgtc ttttgggaaa atgccaaaat catattgtga aaatccttcc |
| 76981 | tactgttctt ctcatgggag ggggaggact ttggacttgt ttctctcctt ttcctgtaca |
| 77041 | tttggggatg tcagaaccgt ctgtttcctc atctacacgt ggttagatgc cgacaacaat |
| 77101 | ctcttctctt aaaattgctt actattagac cagcagagtg tttggtatta attgagcaag |
| 77161 | gaggaatttg taggaaaggc ttggcttaac taggagaggg aatgccaggg agaaatctgt |
| 77221 | atttcccact attttttttt ctttttttga ggcacagttt cactctgtcg cccaggctgg |
| 77281 | agtacagtgg tgcaatctca gctcactgca acctccgcct cctgggttca agcgattctc |
| 77341 | atgcctcagt ctcccgagta gcbgggatta caggcgtgtg ccagcacacc cagctaattt |
| 77401 | ttgtattatt agtatagatg gggttttatc atgttggcca ggccggtctc aaactcctgg |
| 77461 | cctcaggtga tctgcccacc ttggcttccc aaagtgctgg gattacaggc atgaaccacc |
| 77521 | acacctggcc atttcccact attttgttga taaagacatt tggatttccc tgcattaggc |
| 77581 | agatgtggaa gaagatggaa gcgatgaaaa ccttcttgcc aaaatctccc aaaagacctg |
| 77641 | gccagtgggt gagcagatct cagttacaaa aagcctatag gttgaatttt ctaagaaaag |
| 77701 | gcctggggag gaggtaccag gagtccaaat tgaagttcga ttttcattat cacagatttt |
| 77761 | catatctctc tatctccctt tttttgtttt tggtgagaca gagttcaaga ccagcctggt |
| 77821 | caacatggtg aaaccccgtc tttactaaaa atacaaaaaa ttagccagcc gtagaggcgg |
| 77881 | gtgcctgtca tcccagctac tcgggaggct gaggcaggaa agtcacttga acccaggaga |
| 77941 | tggaggttgc agtgagccga gatcatgcca ttgcactcca gcctgggcga caagagccaa |
| 78001 | actccatttc aaaaaaaaaa agaaagaaaa agaaaaaaga aaaaaagaaa atgcactttt |
| 78061 | tgcbgtcagt aaaagttaag caaaagtctt gctgagagac tgatatttaa ataactatta |
| 78121 | taatgcaatg taaaattact gcaagagata tgaacacagt gctcaggaag cttagaggaa |
| 78181 | ggagaaacca agtccttagt gatggaaggt gggctgtcaa ggaaggcttt gtggaggttg |
| 78241 | tgtaattgta ggatgagggc catgtagtag gtcgacgggg ccctcgtgtg ccaggtggaa |
| 78301 | ggaagccatt taagtctttt aagctgagtg gtggcatgat tacaagtgca ctttagaaaa |
| 78361 | atctctatgg cagcaatgtg gaggatgaag taacaaaaat atacactttg gttcattttg |
| 78421 | ttctaaatgg caactttacc tttaactgtg tacagagctt actgactata ctcaagcaac |
| 78481 | aaaatgcaca cttggaaatc ctgtgtcacg tgcctatact agctttgtcg ctgattcagc |
| 78541 | atatacacat cctccagtgt gacaggattg tgtatggaaa caggtaagac tggtgaatac |
| 78601 | taggctgtgt tcaagtgtag agtctcatga ttatcaccaa tactgbgggc tctccctctt |
| 78661 | ttagatgagt ttttctacca tatctttggc tttacaaaat atattaacac agtttcataa |
| 78721 | tagatctctt ggaatatggt cgtttggtgt taagcattct atctggcaaa atgaaaaata |
| 78781 | agatggtaag agttatccta caaaaatcct aatgttctca agctactgct gaaattcttt |
| 78841 | ttctagtaat ttacaaaaaa gtccccattt tcttgtagaa ataagccaat taaaaaaaga |
| 78901 | aaaaaattaa aataaaaaat taaagttctt aatgataaat tatattaaaa tttatttcct |
| 78961 | gttttaccct atatcctatg agcgtggttc tcaaacttcg ttcagtgcat accagaatca |
| 79021 | tcatgtgcgc ttgttaaaca gaggtctggg ttccaccccc agagcttctg attcacttca |
| 79081 | tggaatctga gaactggcat ttctgacaag ttcccagggg atgctgaggc tgctggtcca |
| 79141 | gggaccacac actgagaaat attgttctga aataataaca gctaattttt gttaggcagt |
| 79201 | ttctgtgttc caaatacagg ttgaatatcc cttatccaaa atgcttgggg caagctgggt |
| 79261 | gcagaggctt attcctgtaa tgtcagcact ctgggaggct gaggcaggag gattgcttga |
| 79321 | gaccaggaga ttaggaccaa cctaggcaac atagcaagac actgtttcta cacacacaca |
| 79381 | cacacacaca cacagacaca cacacacaca cacacacaca aattgccagg catggtggca |
| 79441 | tatccctata gtcccagcta cttgggaggc tgagggagga ggatcacttg aaacaaggag |
| 79501 | tttgagacta tcctgggcca catagtgaga ccctgtctct acaaaaaata tttgaaaaat |
| 79561 | tggccaggtg cggtggctca tgcctatagt cccagcactt tgggaggctg aggcaggtgg |
| 79621 | atcatttgaa gtcaggagtt caagaccagc ctggccaaca tggtgaaacc ccgtctctac |
| 79681 | taaaaacaca aaaattagct gggcagtagt ggtgggcgct tgtaatccca gctactcagg |
| 79741 | aggctgaggc cagagaatcg cttgaaccca agaggtggag gttgtagtga gctgagatcg |
| 79801 | tgctcctgca ctccagtctg ggtgacagag tgagaccctg tctcgaacaa aacaaaacaa |
| 79861 | aacaaaacca aaaaaaccaa aacaaaaaac atattagctt ggcatggtgg tgcattcctg |
| 79921 | tagtttcata tgtgatctca ctactgcact ccaatgtggg tcacagagca ggactcaaat |
| 80041 | gaaaacaaaa ccaaaaccaa aattcttggg accagaagta tttcagattt cagattattt |
| 80101 | tggattttga aatattggca tgtatctaat gagacatctc agggatggga cccaagccta |
| 80161 | aacacaaaat tcatttattt ttcatataca ccttgtatac atagcctgaa ggtaatttta |
| 80221 | tataatattt taaataattt tgtgcacctg tcacgtgagg tcaggtgtgg aattttctac |
| 80281 | tgtggtgtca agtcaatgct caaaaaattg cagattttgg agaatttcag atttcagatg |
| 80341 | tttggattaa atgtgcttag cctggacctt acttgttgta gctcgtttaa tcctcatggc |
| 80401 | aatgctagga cacaggtggt tttagtataa tattattaca aatgaagagc ctgagacttg |
| 80461 | agaaagtaag acaacacact ccaggtcact cagccaatta gtggtgagca agaattgaac |
| 80521 | ccagatttga tatgcgaatg acttgctgtg attctcctat tggtgatttt tttttttttt |
| 80581 | tttttttttt ttgagacagg gtcttgctct gtcacccagg ctggagtgca gtggcatgat |
| 80641 | ctcagctcac tgcagcctct gcctcccagg ttcaagcgat tctcctgcct cagcctcctg |
| 80701 | agcaactggg actacaggca tgtgctacca tgcttggcta atttttgtat ttttagtaga |
| 80761 | gatggggttt caccatgttg gccatgtgga tctcgagctc ctgacctcaa gtgatccatc |
| 80821 | cgcctcggcc tcccaaaatg ttgggattat aggcgtgagc cactgcaccc ggccccttat |
| 80881 | tggtgtattt ttatttccca agtatgacac ctgttcagag actttggaac cctgagaaca |
| 80941 | ttttgttggt gtgttttgtg actaatattg cctttttctg agatgaatgc tgttctttga |
| 81001 | aaaaacattt gtatttttag atagaaatgt acttcatccc cagtgaatat ttctgacttt |
| 81061 | agagaaattg ccaaacctgc tgactcataa caaaaataaa gagcatctac tattcagttt |
| 81121 | atggctttta gttttgggag gtggtaggag gaaggataga ttaccaccca ctatagatca |
| 81181 | ttttattttc attttatttt aatgccattt accagtattg tgtatatgga ggtggtcttg |
| 81241 | agagctttgt ggagattatt ttttcaatag tacagatggc tctgataaat atttaaggca |
| 81301 | tcttgggaaa caagaatacc atcctgactc aggagaaatt ggtcacgtaa atcactttgt |
| 81361 | ttcaagtgct ttggcctctg agcatctcaa atggacacat acttcattgg cttattaact |
| 81421 | cattgccgga gtcactgaag gcccaaacta caacttcatg cctgaccaca caccaaggct |
| 81481 | tttttattgc ttagttttct ggctctttgc ctattctgct ctccctaccc ataaccatgt |
| 81541 | gagtatcatg tccagcaaac taacttactc cttctctctc cccactacac acacacacac |
| 81601 | acacacacac acacacacac accacactcc acacgcacac atacacagag catttttcat |
| 81661 | gggtatgttg tcagacagat ttctctgttc tgaaggctca tctccttaga gaaccttacc |
| 81721 | gtgtcaatgt tgcatttagt ttagtttagt gttgttgttg ttgttgttgt tgttgctgtt |
| 81781 | tttaaatctt gctctgttgc ccacagtggc gcgatttcag ctcactgcaa cctctgcctt |
| 81841 | ttgggttcaa gcaattctcc tgccgcagcc tgctgagtag ctgggattac aggcccccgc |
| 81901 | caccatgtcc agctagtttt tgtattttta gtagagacgg ggtttcacca tgttggctgg |
| 81961 | tcaagtcttg acttcctgac ctcgtgatcc acctggcttg gcttcccaaa gtgttgggat |
| 82021 | tacaggtgtg agccactgcg accggcbgtt tttttttttt tttttttttt ttttttcttt |
| 82081 | tttgagacgg aatttcgctc ttgttgccca ggctggagtg caatggtaca atcttggctc |
| 82141 | attgcaactt ctgcctcctg ggttcaagca attctcctgc ttcagcctcc caggtagctg |
| 82201 | agattgcagg tgcccaccac catgcctggc taatttttgt attttagtag agatgggatt |
| 82261 | tcaccatgtt ggtgttgtat ttagttttaa cactgttatc ttctcagatt gtaatgagag |
| 82321 | aacaggctat catcacttgg tgataaaatt tcctgtaatt ataatctcat tctcaaagat |
| 82381 | aaaacattga tacctaatgt gcttttaact ttaatgccaa tttatcacaa tggaagacat |
| 82441 | ttcaaataaa tactgttttt ttgttcataa ggtcttaaaa atcttgaata taactgcaaa |
| 82501 | aaagcattac atgttaaaag aaatcacaaa attagttaag aaaggagcca aactgaaaga |
| 82561 | agattatatt tctatgccct tgaatcttta caaaatttag taaaaactat taatatagaa |
| 82621 | ttatttacaa gagacttctc tatttaccag cccaatatct tcacatttct acaatctaag |
| 82681 | gggaggtgat tgtggccaga aaagtttctg ggctctggta ttgcagtttt cctgcactta |
| 82741 | ccaccatccg gcatgttata tattttactt atttttcttg cttattgctg tctctttcca |
| 82801 | caagttccat gagcagagac agtttatctg tgttttttac ggctattctc aatgtctgta |
| 82861 | acagtgtcta acgtactata gtcattaaag aaatgctggt tgggtgaatt cagaaataaa |
| 82921 | ttagtaaata ggtgaagcat gttggtttaa tattcatcat cagaacttaa aaacagttta |
| 82981 | aagaacctca actgagtttt gtacaataag tagtgacaag gtgggacaga ggtaatttct |
| 83041 | ttgtatctct gaggctttcc atttcatgag gaacatagaa taatatgtgt ttccaaatgc |
| 83101 | agtgttcaat atctgaagag tatatatcat cagtatagaa aatagacaac acatgttaaa |
| 83161 | gggaatgtaa aaattctaga tgatttttaa ggtatgtatg gtttaatcaa ttgtttatat |
| 83221 | gctattctct tctcttaaaa tgaaataatg cgaatgaaaa aataaacctt acaggtagtt |
| 83281 | tctgggaaat tcagacaaca aaattgtcta acatacgcca aaaacaatat agcatttaat |
| 83341 | gatgacatgg attccgaaag acaaatcact gctcatcata ttacaaggaa tccaaacaac |
| 83401 | tgaggggtta tcatttatct atagttgcat aacaaattac cctaaaattt agcagcttaa |
| 83461 | aacaacaatt tattatttca taaatttctg gggatgagga atccagaagc agattcactg |
| 83521 | ggtggttctg gctcaaagta tcttatttgt ttgctagggc tgcbgtcaca gaacacaaca |
| 83581 | gcacaggtgc cttaaataac agaaacatgc attctggagg ccagaagtcc aagaccaagg |
| 83641 | tttcctctga ggtctccgtc cttggattgc agatgcttgt cctcttgctc cctcttcaca |
| 83701 | tggttgtccc tctgtgcaca tgcacttctg tgtctctttt tgagtgaaaa tttataagca |
| 83761 | ttccagtcag attaattttt tttttttttt tttgagatgg agtctcactc tgacacccag |
| 83821 | gctggagtgc agtggtgcaa tcttggctca ctgcagcctc cacctccctg gctcaagttc |
| 83881 | ttctcctgcc tcagcctccc aagtagctgg gattacaggc atacaccacc acgcctggct |
| 83941 | aatttttgta tttttagtag agacgtggtt ttgtcatgtt gcccaggctg gtctcgaact |
| 84001 | cctggcctca agttatccac ctgccttgtc ctcccaaaat gttgggatta caggtgtaag |
| 84061 | ccattgcacc ctgccccagt cagataaaat tttaatctca ctttaactta atcacttctt |
| 84121 | tgaaggccct gtctccaaat atagtcacat gaattagggc caagctgtat ggcttcattt |
| 84181 | aaccttaatt acttctttag aggctctatc tgcaaatgcc tccacattct gaggtggtgg |
| 84241 | gggggttagg atgtcaacat atgaatttga gggggcacaa tttagcccat agacacctgt |
| 84301 | catgaggttg tagtcagctg tcagttgggg ctgcaatctc atctgatgga ttaactgggg |
| 84361 | aaagatgggc ttcccagctc actggtgtag ttgttggcag gcctcagttt cttctcgctg |
| 84421 | gagacttcag ttcttgccat cggcttctcc acaggttgtc cagattacct aatgacatag |
| 84481 | cagctggctt ccccaaaagc atggaatggg ggttggggat gggataagag agagagaatc |
| 84541 | caagacagaa tgcacagtct tcttataact taggtttaga aataatatat cagtacctct |
| 84601 | gccacattct gttggtcaca cacactaacc ctggtaaaac atgggagtga accatacagg |
| 84661 | gggaactggg gtcattggtg gtcatctttg aggctggcta tggtaattag gtaaaaataa |
| 84721 | aaattcagtc tgcagaaacg tatgtactta tgttacttaa aatattttaa ccaattagtg |
| 84781 | aaaaatgact ttgaagtatt tttagctgct ataataattg agtaggaatt attttttctt |
| 84841 | ggattgagtt atatttacta taaaaatact tacttttttt gtcaaacaca tttataagtg |
| 84901 | ctgcaaatat tagtgaccaa tggtctattg ctctaaataa aaagcaccag gagttagtat |
| 84961 | agtagttgac tccagcctct ggtgctagac tgcctgggtt tgaatattta cttttgcact |
| 85021 | tacaacttgt aacaacttga acaatttatt caatctctct gttccctagt tttctcatat |
| 85081 | gtcaaatggg agaaacaaat aacatctgct tcatatggct gttatgaagg ctaagtaggt |
| 85141 | ttatatatat gtatgtatgt atgtatgtat gtgtgtgtgt gcatatatat atatatatat |
| 85201 | atagagagag agagagagag agagagaaag agaacttaga atagggcctg gcacagagaa |
| 85261 | tatgataaaa gaatattatt tgtttcctct ttttatcatc cagaacatgg tgtaatgccc |
| 85321 | aatacattgt agatactcaa taaatgtttt tgtatgatcc ctaaacattg tctgtaagga |
| 85381 | atttacaatg gagtttacag taaaaggtgg tacatggtag gtaccatgga agcattacaa |
| 85441 | acagatgacc atgtgaatct gaaagaagca cagattgatt tcttcgtcat aaaacatggt |
| 85501 | tgtatttgag ctaaagctta gaactaatga agattattgc caggcgtggt ggctcacgcc |
| 85561 | tgtaatccca gcactttggg aggccgaggt gggaggatca caaggtcaga agatcgagac |
| 85621 | catcctggct aacatggtga aaccccgtct ctactaaaaa tacaaaaaat tagctgggtg |
| 85681 | tggtggcggg cgcctgtagt cccagctact caggaggctg aggcagaatg gtgtgaaccc |
| 85741 | aggaggtgga gcttgcagtg agccgagatc gcgccactgc acttcagcct gggcgagaat |
| 85801 | gcaagagtct gcctcaaaaa aaaaaaaaaa aaaagagtat caatgtatca aaatcattat |
| 85861 | tttaggctgg gcatggtggc tcacatgtgt aatcccagca ctttgggagg ctgaggtgag |
| 85921 | agatcacttg agcccaggag ttcaaggcca gcctgggcaa aatggtgaga ccctgtctct |
| 85981 | acaaagaaaa aaaaaagatt attattcccc aaataggaaa taacataagc aaacgtcccc |
| 86041 | tatttccccc acgatggagc tggagcatgg tgtatgagaa ggagagtcag agggagcaag |
| 86101 | aatgaagggg tcaggttggt accaggtaat gaaatcattt taacataaga ctacatgatt |
| 86161 | tggacttcat tgtgtggtca cttcggagca ttttagcaac aaaataatgt cttaggaaga |
| 86221 | ttaatctggt ccaattgtaa agtaaattga gattcaggct tcaggcttgg cttgatccag |
| 86281 | gattcaaata aaatcaccaa gaatctgtat ttcagatctg ctttttttgt gtggctctgc |
| 86341 | ctgtggctcc ataagaagca cagaaaaaag agaaatggtc tgttaaacag aaaaagtgaa |
| 86401 | aaagcttcac tcccagaaaa tatcttcttg catctcatcg gcctgagttc actcatgttc |
| 86461 | gtattcttca acaaattatc atgtccagga tatgaaacgg ctgcttggat ccaggcacac |
| 86521 | tgataacgct gataccacac ctagaaaaag aaatgaattt cattcaaatt ccattctact |
| 86581 | attttaaggt ttcatgtcta gatggctgga gattaagtgt tgcagtccag gcgtggtggc |
| 86641 | ccacgcctgt aatcccagca ctttgggagg ccgaggtgga cagctcactt gaggacagga |
| 86701 | gtttgagacc agcctggcca acatgatgaa accccatctc tactaaaaat acaaaaaata |
| 86761 | gccaggcttg gtggtgcgtg cctgtaattc cagctactcg ggaggctgag gcaggagaat |
| 86821 | cacttgaatc caggaagtgg aggttgcggt gagccaagat ggcactactg cagtccagtc |
| 86881 | tgggtgacag agacttcatc tcaaaaaaaa aaaaaaaaag taagttttgc aattaggaga |
| 86941 | catgcctata atgtttattt agtggtgata cgtatggttt agtcctttaa ttatagtgtg |
| 87001 | gtttaaatgc aaatttaaag taactcaaat acagctattt tttctcacat catagggaga |
| 87061 | ctataaagtc cctcagtaat cattcttcaa atagatattt ttcttctttc atctactgcc |
| 87121 | ttcacgactg cagtcacttt ctccaacagt cttttctcca aataaaaaca aaaacaccac |
| 87181 | taccaccact accaaaaatc tcaagtacct gctatctctg atctttctca tctgctaata |
| 87241 | ttctcttcct cccttactcc cctcctcttt tcttcctttc ctccttcccc atctctccat |
| 87301 | ctcacacctc cctctcttcc tacctccctt tctttcaacc ttttcccctt ctattcttcc |
| 87361 | ttccctcgct tcctccttcc cttccttcct tccttccttc cttccttcct tccttccttc |
| 87421 | cttccttcct ttttgctatt aaaaattcct caaactggct gggtgtggtg gctcatgcct |
| 87481 | gtaatcctag cactttggga tgccgaggtg ggtggatcac ttgaggtcag gagtttgata |
| 87541 | ccagcctggc caacatggtg aaaacccgtc tctactaaaa atacaaaaat tagtagtgta |
| 87601 | tggtggcacc gcacctgtag tcccagctac tcagaagggt gaggtgggcg aatcacttga |
| 87661 | acccaggagg cagaggttgt agtgagccga gatcgttcca ctgcattccg gcctgggtga |
| 87721 | cagagtgagt gagactgtct caaaataaca acaacaacaa aaacaaactg gcaatgcagg |
| 87781 | acttccttga aagacagagg aaaggaaaag attaagagaa gttataccaa aactcttttt |
| 87841 | aataggtagg cagggaaaaa attgggaacc tttatacatc aataatttta ttctcataat |
| 87901 | acttggaaat catgactagc tgttgctctt cttcaacatc taactattat catttccaca |
| 87961 | tctgattcaa gcacttcctt tttacatgtc tttttttttt ctttgcctga aatattattt |
| 88021 | ccttccatca aattaacctt tctgcccacc tggcaaccct ctcttcttca agccttactc |
| 88081 | atcaagaagc cttccctagc aacagggaag gctctgctac caatcccacc tttatgctct |
| 88141 | ctggactacc actttgtctt gtacatttct attaaattgt aacttttcat ttttgttaca |
| 88201 | catctattga ctctactgct cagtgaacta tttgagacca ggacaccatt ttgcatacct |
| 88261 | agcacaatac ctaccacata gtagacattt cataaatcct tattgattga ataaatcaat |
| 88321 | gatgaataac atttttataa atttcatttt gtatttgagt tgaagctcca agtattacac |
| 88381 | cctgttagag attttaaact tgatttttaa aatattggac tagagcttaa aagaagatta |
| 88441 | tattagtcag gggtctcaag agaaacagaa tcaataaagt atacatttat tatataattc |
| 88501 | attataagaa attggctcac atgattgtgg aggctgacaa gtctcaatac ctacagtcgg |
| 88561 | caagctagag acccaggaga acctatggtg tagtccaggc tcattccaaa ggcctaagaa |
| 88621 | ccaagcgagc caatgatgta gttctagtgt gaaaacctgc aggctctaga cacaggaaga |
| 88681 | agccaatgtt tcagttaaag tccaagggca ggaaacacca aggtcccagc tcaaacatag |
| 88741 | tgagacagaa ggaattctct cttactcagc cttttgttct attcaggctt tcaacagatt |
| 88801 | ggatgaggcc cacccacaat ctgctttacc cagtctactg atttagatgt taatctcatc |
| 88861 | cagaaacacc ctcacagaca cacctagaat aatgtttgac caaatgtctg ggcaccctgt |
| 88921 | tacccagtca agtggatgca taaaattaaa caccataaag actaaagcct gtagatgaat |
| 88981 | atctggtaac acctcacaga ggagagacct aaagctgtga taacgtctct gaagccaaga |
| 89041 | gagaaaggct agaaaaagca agatctggga tatttcctta gaatccttgc ctgaaggcca |
| 89101 | agaagatgag gaagttaatt ttctcatcca gagtggtggt atcgagctag aaaattgtga |
| 89161 | agatctttct agttctaaaa catctgttac ctccttacct tggggtttca agactgggta |
| 89221 | aatggaaata ctaagataat tggatgatgt aagaagattt tggatgggaa caatatcttg |
| 89281 | ttatgcacca gttgtatgga aactacttat ttataagatt taaaattcta cgtatattcc |
| 89341 | ttcaggaaat gttgtcggct ttctacaaga tgcagcttta attgtattat tgggaaccat |
| 89401 | cattgattat taggttcttt ggagaaattt ctttccttca attagaagca cccatgaagg |
| 89461 | atatgaagaa gagttggtca aagaactata agaagatcat agaatgtact gcactataga |
| 89521 | agccaaagga agaggtaaat caagaggcaa gaaatgatgg aaaggtattt tgctatagag |
| 89581 | aggtaaaggt tgataagact tgggaaaaag gccatcggat tttacgatta ggatattaag |
| 89641 | gacaagtttc agccaagtca tgagaaactg agcatcagtt aggtccctgt tgtttgatat |
| 89701 | tatgacaatg tggtggattt agtaattaga gtctttcaaa attgtctgtt agtgctttgc |
| 89761 | agcttggggg catgagcaga gaaggtaggg ggcaggagga atggggagca tgtctgtggc |
| 89821 | tgagagttga aggcttgaat ggtaagagta ggcttgagga ttgtggcttg ttagaaaaga |
| 89881 | cagcattaaa atatctgaac atgggacttt gtttttagaa aggatacaaa tgaagttaaa |
| 89941 | agccagaaga aggtcttggg tgggattttc aagctgcatt ccttggagtc ttgaatcgtg |
| 90001 | gattagagaa aagaccaccc tgtgttgatc tcagtagctt ctcctgttaa acatcacagc |
| 90061 | acatgtgctt tgaccagttt tgtatattaa ggctctatgt ggctatcttc tgtcccgctc |
| 90121 | tgtcccccac ggccattctc tttccttcac catgctgctc tatgacccgg gaggctgacc |
| 90181 | tatatggacc atatcagtgg gctgctttgc cctcctgctt ctgtttggat tttgcccttg |
| 90241 | gggagcactt gcatgagctt gcagggaggg agaatgagag gcaaggtata atctgctgtg |
| 90301 | acctacaggg tcatcaggat cctttcccct tcaggcctag agttggtaat aatgcccagc |
| 90361 | tttcttaggc ccttgaaatt tctctatacc ctgctatatc tgttcaattg cctacataac |
| 90421 | ttaaccagtg tatgcttact actcactgca gccttgatct ccctggctta ggtgatcctt |
| 90481 | ccacctcagc ctcttgagta gcbgggacta caggtgtgca ccaccatgcc tggttaattt |
| 90541 | tttgtatttt ttttgtagag acagggtctc accattttgc ccaggctggt cttgaactcc |
| 90601 | tgggctcaag caatcctccc accttggccc cccaaaatgc tgagattaca gacaagagcc |
| 90661 | accactcccg gcccaaacat tttttttttt tgtaaaaagc caggcagtaa atatttttga |
| 90721 | tctgtgagtt atacaatctg tgttaccacc acttaactct gctatctcag tgagaaaaca |
| 90781 | gccatagatg ttaagtaagt gaatgaatgt agcbgtgttt caataaaact ttatttacaa |
| 90841 | aaacaggcag tgagctttgc ttttggccca taggctataa ttgaaagacc catgatctag |
| 90901 | gacaagaagt tttccatcta ctctatgaga gtggttctca atctgggata atttagctcc |
| 90961 | ctaagggaca tttgttaatt taagacattt ttggttgtca caactggagg agtagtgcta |
| 91021 | ctggcatcta gtggataaaa tccagggata ctgctaaaca tactgcaatg cacaagacag |
| 91081 | cccccacaac aaaaattacc ctgcccaaaa tatcaatagt gctgaggttg agaaatgctg |
| 91141 | gtcttgaaga tgttaaaaag attgtcagtt tgttcatcat atcgctgtgg cttggcgaaa |
| 91201 | agaatcacag agttaatttt ataactatga aggattgtta ggagctgagt ttttttctag |
| 91261 | ttcttatttt ttaattattt tatgatactt ttcataaaaa gtggtgtaag ttgtgtttat |
| 91321 | tcagaaatgt gatttttttt tttttttttt gatggagttt cgctcttgtt tccgaggctg |
| 91381 | gagtgcaatg gcgggatctt ggctcactgc aacctccgcc tcccgggttc aagcgattct |
| 91441 | cctgcctcag cctcctgagt agcbgggact actggccacc atgcctggct aatttctgta |
| 91501 | tttttagtag agatggggtt tcaccatgtt ggccaggctg gtcttcaact cccgaactca |
| 91561 | gatgatccac ctgcctcggc cttccaaagt gcbgggatta caggtgtgag tcactgctcc |
| 91621 | cagcccagaa attgatggtt tctttagcaa ttttgtcacc catcaagtcg ttagtcatat |
| 91681 | taatcctcca taacttagtc tttttgcccc ctgattatct tttgggtggg cagtgaaagt |
| 91741 | attcatacct cttttagcaa aacctatctc ttcttggatt tcctttgctt gctgattaag |
| 91801 | aggaaggact atctgtgaaa gactcagatg tggctcaatg gaatgaatgt gagaatggta |
| 91861 | tgagtgtggg tggtgggtgc tgtgggggtc ggagatgagt ggctgaacca tccaaaaata |
| 91921 | agaatactga caagcgtgtt ttcttgtgtg tgtgtgcgtg ttgtgggagg agtgtaactg |
| 91981 | atgtggctag acaggattaa cgaaagtctc aggagttgag agagactggg gacattttac |
| 92041 | caatggcgag aaggaggaag gatgacagct gggaaaatta gtgattggaa aaggtaggct |
| 92101 | gggcagtgtg gccatgagct agtccttttc attatattct tctggggctc tatgtttaaa |
| 92161 | actagatact ttaacatttc agaatgagaa agagaggaaa ggatggtaac tgatatgggc |
| 92221 | tattatactg tgaattttaa aggagcctat atattatcct aaaactattg aacctgagca |
| 92281 | gaactgcaac gttggtattc ttgaactgaa ctgatatttc ctttgactaa tgtccttgtt |
| 92341 | caatgaccag agaccatgac actccccacc ttcaccccca cacattgttt gtttgtgtcc |
| 92401 | agtttgaaga acaatgacac atggaggtca gtgtttggat gatgtcataa ttttgatcag |
| 92461 | ctggaaagcc tggagtggcc ttgaagagat gcttaacttt tggaaatcac ttctttattg |
| 92521 | caaccaaagc tattaagttt aaaggtccat aaagatgaga taaacagtca taaaggcctt |
| 92581 | ttgaaattca tacttagtgt gttaaatgga tttaattgct gttagttaaa tgtggtgatg |
| 92641 | ttaaagcaat gtctatacac tggcaaaaat cagatcatca actgcttaat gagggacacg |
| 92701 | tcttgagaaa aacagtggaa gaaatgctgc ttatatgtaa tttgtgatta atttttgcaa |
| 92761 | ggttttcaag ggaataactt ggccttaaaa tattacagtg aaaaacagct ttatacttgg |
| 92821 | gtccaatctt cttaaaatta gagttcattt ttgctattag acacctttta ttacaggata |
| 92881 | actttttctt cccccttgga gacagagtct tgctctgttg cccaggccag aatgcagtgg |
| 92941 | cgtgatctcg gttcactgta accaccgcct cccaggttca agtgattctt gtgtctcagc |
| 93001 | ctcctgagta gcbgggatta cagtgcctgc caccatacct ggctaatttt ttgtatttta |
| 93061 | gtagagacag ggtttcatca tgttgctcag gctggtctga aactcctgag ctcaggcaat |
| 93121 | ccacccgcct tggcttccca atgtgctagg attacagatg tgagccactg agcccagcca |
| 93181 | gttataggat agcttctaaa cttacaatcc ttgaaatatc attttaggat aattctgatc |
| 93241 | ctgcatacca gtgaaataag tataattgaa atattaaacc aaatttggct tcaacattaa |
| 93301 | accaaaatta aaccaaatta agccagtatg ttaaatacat agtttaatct taattctagt |
| 93361 | taatattttt catttcctat gtgtcaggca atatactaaa caacttacat gtattactat |
| 93421 | tttaattctc ctggtaaact ggaggggtgt gcaattattg tcatctccat tttatagatg |
| 93481 | aagaaaactg agtcataaag aggttatgta cttggctgaa agtcacacag tcagtgatac |
| 93541 | tgttggaatt tgcacccaga caatttaatt ttagagccta ttttcaacca ctctctgaga |
| 93601 | ctgctttcct tttctgtact tttgatgata aatgtgaaaa gataattttg agggcattat |
| 93661 | ggtgtattgg atcttaaaaa cccaggtaat aagtcccatc tatagtacaa ataagctgcg |
| 93721 | tgatcttagg gaaatcacat aactgcttct gtaaaatgag agattacatt aagttatttc |
| 93781 | caaaatgtct tttcgacttc aatgtggtga ttccatagta atgtataggt ttttaaaaaa |
| 93841 | ccatatcctt caatcaaatg gtcatccttt agcattaagt tgtttggaat agatactccc |
| 93901 | caaattcaca gaataatttt ccagcctctc tttttgcttt gacacctttc ttattttttt |
| 93961 | tttttttctt cgagataggg tctcactcag tcgctcgggc tggagttcaa tggcacgatc |
| 94021 | ttggctcact gcaacctctg cctcccgggt ttaagcaatt cttgtgcctt agcctcctga |
| 94081 | gtagcbgggc tacaggcgtc cgtcaccaca ctcagctaat tttttttaat agagatgggg |
| 94141 | tttcaccatg ttggtcaggc tggtctcgaa ctcttgacct caggtgattc ctcggcccta |
| 94201 | gcctcccaaa atgctgggat tacaggcgtg agccaccgtg cccgctattg accccatttg |
| 94261 | ttgatgctta gggatgaaag tggaaactcc actgctaaaa cagagaatat tacttgagtc |
| 94321 | attcctctgt catatatggg atgtttgcca gcatggaaca ttcacagaaa ttataactgt |
| 94381 | aaaggcccta gcaatgattt aatgccgtct cttcacatta tagttgggga agctcaaact |
| 94441 | gtgacagggt cagggacagg taaaattcac aaagttggtt tacagcagaa ctgtgctaca |
| 94501 | gttatctgga ttcagatcca agtcccctcc aaatgaatca caaccacttc tacctttata |
| 94561 | attccaggcc atgaaagatc actgttttag tctgcgtggt gcagtggaac agatagacct |
| 94621 | cggtttgaat ctcagctcta ctgtttacta gacatgaaat ggggaaatct aaaatgagta |
| 94681 | agtatacaca gaaacacaca ttacatacat atatgtaatg ttcaggatca ttacactgaa |
| 94741 | ctttagggct tagtactaat gtacaatcaa ggttgtgtta gtactgagca gtatatcttt |
| 94801 | tattgttgaa gtccaataag aacagagcag atatcaacct aatttgtaag tgatgcattt |
| 94861 | tcctaaacta aatgcccaat aatggaatgg gctagaatat tgcaggacag ggctgtgaat |
| 94921 | ggaggaaagc agttggaaaa tcaatccttt taaaggcaca aaaggatgaa tgaaccacat |
| 94981 | tcccaagaac ctgctcccac ccactgctgt tcccaccccc gctgtagttg gtagcatgtt |
| 95041 | cacaaggaag gagctggcta gctttcatgg gagccacatc atccatcaaa tcacattagt |
| 95101 | gttgttgatt tgaatgttgt ttcctttgta ggtctgcttg ctttgacttt gtaaaattgt |
| 95161 | ttagtcttgc cattattata taaggactat aatcataagg catttatatt tcattttgta |
| 95221 | ttatgtattt aagcaaaatt aagttaaaaa ttagacagag atatatagga tgatttttcc |
| 95281 | ttcaagagtt attcatttat ttccttttgg atatgaaaaa cgcttatgca gtcctgtatg |
| 95341 | tggtctctct ctctttttat ttttatttat ttattttttg agatggagtc ttgctctgtt |
| 95401 | gcgcaggctg gagtgcaggg gtgctatctc ggctcactga aacctctgcc tcctgggttt |
| 95461 | aaatgattct cctgcttcag cctcctgagt agcttggatt acaggtgcca gccaccatgt |
| 95521 | ccggctaatt tttttgtatt tttagtagag acggggtttc accatgttgg ccaggctggt |
| 95581 | cttgatcctg acctcaagtg atccgcttgc ctcagcctcc caaaatgctg ggattacagg |
| 95641 | catgagccat tgtgcctggc ctgtggtctc tttttaaatg tttgagattt tctctgacca |
| 95701 | tcacatgatg gcagccgcaa gttgtaaata tattaaatga gataatacca aatggcataa |
| 95761 | gaccactgtg aattcagtga tgttccaaaa taacttgtat tttattcatc acacaggcat |
| 95821 | ttatataaat taaaaaataa tagcacctga aaacatgaaa ataattgtat tcaaggttat |
| 95881 | ttactgcagc atgattttta agagaaaaga ctggaaacaa cccaaatgtc cactaatcga |
| 95941 | gactgtgtga acccaagatg ttatagctgc atcacacagc tgagagaagg aataagatct |
| 96001 | atttctactc actgccagtg gtaatctcca ggaagcgctg ttaagtgaaa gagcaaacta |
| 96061 | gagaaaatgt gaatagtggt taccatttac ccaagaagtc tatgtgtggt gtgtgtgtgt |
| 96121 | gtgtgtgtgt gtgtgtgtgt gtgtgtgtgt atgtgtgatt tctagaggga cagaggaaaa |
| 96181 | aggtgaagac aaggatagga gcgagacttc tctgggtaca tctttttttt tttttttttt |
| 96241 | ttttttgaga caaagtctca ttttgttacc caggctggag tgcagtcgct tgatctcagc |
| 96301 | ttactgcaac ctctgcctcc ggggttcaag tgactctctt gcctcagcct ctcgagttgc |
| 96361 | tgggattaca ggtgcccacc accacgcccg gctaattttt gtatttttag tggagactgg |
| 96421 | gtttcaccat gttggccagg ctggtctcct gaccttaagt gatccaccta ccatggcctc |
| 96481 | ccaaagtgct gggattatag gtgtgaacta ccatgcctgc ctgtctggat ctctttttag |
| 96541 | tacatttgac tttgaagcca agttagtatt ttccataatt aagaaaaaaa tagaataaaa |
| 96601 | aaggaacaat ttctaaaaag gaagtcaaaa gaaacacatt aaactaactg taagttgagt |
| 96661 | tggtagcata accacacaga cagaaattat ttcaagtgac tttaacacat actgatgtga |
| 96721 | ctgtgcatcc ctatcgagat agaaataaag gtaaatataa ataaaggtaa aaataagcaa |
| 96781 | gatataaata aagttaaaat gaactgcaac aatcctgaat agttttcaat aattatatca |
| 96841 | taaatagtaa ttttggtatt gttattttaa aacagttata tttataatac atatgttaat |
| 96901 | gtaatcatgt ttatgcttat cataacatat ggatgcacag ctattaggat aatgtataaa |
| 96961 | catgattatg ttaatgccat tagggaccaa gatttcagag aaaaacaaag aaaaatataa |
| 97021 | aattaaagaa gccagtaaaa atgttatctt aaatttaaac tggaaacctc agtataaact |
| 97081 | cataatgtgt tttcttttaa aaaattattt tcaaattcag tctcctgaat agaactcgca |
| 97141 | acaattacca agccagtagc aacgacaata aacagcccta gtgcccagat ggtgctctcc |
| 97201 | aaatgccatt ttccactaaa aggaatgagg gctccttgga gaattggatg ttttcagata |
| 97261 | cagagcagaa cacatacaaa aagttcctgg aacatttgtc atactgaaaa gcagatacac |
| 97321 | tatgaaagac tatagtaatt gtatcaaaag aactcaggag ccaccatgaa gaggccccca |
| 97381 | gtgtccagaa atggaataat gtgaacatta agaataataa atcttaattt gtcaagatac |
| 97441 | aaatttaatc atatcgtaga tactcatagc agcattattt aaaataatga aatattagac |
| 97501 | acaacttaaa tattcaaaac tagcagtgtg cccttatata tagaaatgtc atttaaacct |
| 97561 | tgtagaagag aagtttatga tttaggaaga tgtttacaat atgctgtaaa acacacacaa |
| 97621 | caagtcataa aatattatgc atgcagtata ttccagttta ttttaaatga tctaggtata |
| 97681 | aatatccata aaaagaaaac tgaatgaata aatggtgaaa tgtgaatagt tgctatatct |
| 97741 | gtgtggcagg attacaggtg gttgtattct agtttctctt tatgttccaa tcttctacag |
| 97801 | ttagcatgta taattttata tttttttaat acaaaatatg ttatttaact agtatttact |
| 97861 | aaacaaaaaa ttaaaaatta atatatttta taaaaacaaa agcatatgaa tagaaaagta |
| 97921 | cattattttt taggttatag acaatgcttg tacctgtgtt tagggatttg atcctccagg |
| 97981 | taggaaacta cagatctaat ttaacttatt taattaatta attaattaat taatttattt |
| 98041 | atttatttac tttgagacag agtctcgctc tgtcaccagg ctggagtgca gtggtgtgat |
| 98101 | ctcggctcac tgcaacctcc acctcctggg ttcaagtgat tctcctgcct cagcctcctg |
| 98161 | agcagctggg actacaggca tgtgccacca tgcccagcta atgtttgtat ttttagtaga |
| 98221 | gacggggttt caccacgttg gccaggatag tctcaatctc ttgaccttgg aatccaccca |
| 98281 | cctcaccctc ccaaagtgct aggattacag gcgggagcca ctgtgcctgg cctaatttaa |
| 98341 | aaaattttta agtcaccaaa aagcaaagtg acatgctcaa gtccattatt gccaagcaaa |
| 98401 | gaaaaaaatg tcaaaagtac aaaatgtggt tatgttttaa aaattagatt attattatta |
| 98461 | agataggatc tggctctgtt gcccagacgg gagtgcagtg gtgtactcat ggctcactga |
| 98521 | agccttgact tcttgggctc aaatgatcct ttcacctcag cctcctgagt agccgggact |
| 98581 | ataaggcagg caccaccatg cctggctaat taaaaaaaga attttttttt tgtagcaatg |
| 98641 | aggtctcact atgttgtcca ggctgatctt gaatgcctgg actcaagtga tcctcctacc |
| 98701 | tcagcctctc aaagtgctgg cattacagtc ctgaaccacc atacctagcc agatttctat |
| 98761 | tactttgaca tggtcctgga tacttcatct atgtgtgcaa aatttcgtac ttatctctta |
| 98821 | aatctggaga aaaatggcca aatttggtat agttgaattt atcatggggt gattaataag |
| 98881 | tgactaaaga ttgaccttca aggatctgaa gatctgacca gtgtagattt atagtaatta |
| 98941 | tagtaattac atggtacctc caggtatttt ctatacattg ccgtagttag ctatgaaagg |
| 99001 | atgtaaagaa taaaggcaat tgactatttt aaagaaatta acctcagaag gagattcttc |
| 99061 | acctaaatgt ccctgcaaat attattgctt tatgctctga gttagctgaa aatgagttta |
| 99121 | ctatgcctgg tgtaaacact tgcaccaccc acctgtgtca aagaactttt cactaactgc |
| 99181 | atcatgactg attgacgtca gtctacttgg caaccaagtg agccacttag aagaaggctc |
| 99241 | cccttatgag gttaatttct ttaaaatggt gaattgccct tattccttat gtcttttcat |
| 99301 | aactgattac acaaatgtat agaaaatacc tcttgagata caatacaatc tgtaactagt |
| 99361 | catcagagaa taacacgtta ttgtaacaca gatttagctt ggccataaag ggcatattta |
| 99421 | catacacatt gaaaacaact ttaataaaat gaaaaacata tatccttgga ttcttagcaa |
| 99481 | tttaacagca atgctctcag gggatcaagc tactatttat tgactccccc tgtgtgcctt |
| 99541 | acacgtaatt actgaccctc acaacatccc tgggagttag tgtcttacag gagacctttg |
| 99601 | acatttgtga gaggacatcg tgaatatttt ccaagtcctc aatccaaaag tgtggacata |
| 99661 | gctgttggtt ttcctgaatt gtatttcttt caagaatcaa atgttgcttg tgaatattct |
| 99721 | catgtaagat taaaaaaaat cttttcctga ctcttagaac tttagtttta tctctgcttt |
| 99781 | gagagccact ttaataagca aactaaaatc actctacaga aaggctgtac agcaaatgag |
| 99841 | tagagaacaa aagctggcta aactgggcag tcagctaaga tcactcagtg tctgagaatt |
| 99901 | tgttctagaa aatcaccctc cgagaatcat gcagattgtg cttaggcttc cttcatatat |
| 99961 | tcatactctc ctcgggtgaa cataaattgg cacatttata aggaaatttt attattatat |
| 100021 | actcaaatat ttttaaacat ataaatagtt tgtcttgtta attctacctc ttggaatcta |
| 100081 | tcctaaggaa aataatcata agatatctgc aaagaattat ttgaatgttg ataataattt |
| 100141 | tatctataac aataaaaatt tgcaaggtgg cagatatcag tttatgtctc tgagctccaa |
| 100201 | atccaccctt gtttatcttg ctttgtgtga atggagctgg accctgtgga tctttctctt |
| 100261 | ttgcaaattt gggggatatt caactttgtc aattgagggc actggagaga ccctgcaatg |
| 100321 | gaatagaggc tccaggtgca cctacaggcc atctttccct accagcagcg atttcagagt |
| 100381 | aacttcagcc tgtccatacc ctccagcaat ggtgggtcac ttctatagat gaactctggc |
| 100441 | ccacccgcag caccaagcaa aggaaggtca ctcctgtaca ccagcttcca accactctca |
| 100501 | tccaccagtg atgatagatt gcttttatgg atcaatgcca gcctttgcac tcagtcgttt |
| 100561 | ctttgttcct gcaggctgcc tgtggtagtt actatctctc tgaagaggtc tgaatctcag |
| 100621 | ccttggggca aggagggctt gtcctcatcc ttagtgcctt tactgttctt cttcctcagc |
| 100681 | ctagaaataa tagctccttt taaaattctt gatgcctggg cctcttagag tcctccttta |
| 100741 | tatatctttt agtaggtaat ttttggaaca ttaaattttc cctgttcaaa taattatcat |
| 100801 | agtttttgtc ttccacttgg accttgaatg atacaaaagt taaaggctca acaataccag |
| 100861 | acttgttaaa taagtaggga gctatccaca cactggcata aaattgtttt gattatctat |
| 100921 | tattcccttg gtgaggtgac ccagaccctt gtttgaaagc gttttattgg ctgggtgtgg |
| 100981 | tggttcatgc ctgtaatccc agcactttgg gaggctgagg tgggcagatc acctgaggtc |
| 101041 | aggagtttaa gaccagcctg gccaatgtgg tgaaacccca tctctactca aaagtacaaa |
| 101101 | aattagctgg gtgtggtggc gggtgcctgt aatcccagct actcgggagg ctgaggcagg |
| 101161 | agaatcactt gaacccgggt gtcggaggtt gcagggagcc gagattgtgc cactgcactc |
| 101221 | cagcctgggt gacagagcga gactccatct caaaaaaaaa aacaaacaaa agaaaaacaa |
| 101281 | caacaacaac aaaagaaaaa acaaaaatga aagaaagggt tttatttgtc ttctctctct |
| 101341 | ctccctgttt tttttttttt tctttttttt ttttttgtct catctttgct gtaattgctc |
| 101401 | atttgctagg gtcattggac acagagatac caagatgtct tcagaaatca tgaatattcc |
| 101461 | ccaagtcctc tatcaaaaag tgtggacaga gctgtcggtt ttcctggggt ttagacatgt |
| 101521 | tctttcttgc ttctgttgtg tagtaaccct agctcctcaa ggaaatcgtg gtctatgggc |
| 101581 | tctgccaaac agtaattcct ttctttgctt gctggctcac tggcttgagg aactcaaagt |
| 101641 | aatcctttgg taatttcagc ttccaggtca gtggggacat taatgtgttt cttggtagaa |
| 101701 | atgtcactct actccaagaa ataagatctt taatccagaa aacctgagtt ttcagggaca |
| 101761 | gaatgcacaa acttttatgg tcattcactg ggagttctaa tgagcaggtt cgatcatatt |
| 101821 | tctattcttt agttcctcga cccatgcatt ttagctactg ggcggcgaac catgtatcag |
| 101881 | ctgttagtgc tgtgtgtatt ccatatcatg aaggtaattt cccaggccca caacgttttc |
| 101941 | ttcccaagct ggtgccgtaa ctgagccttt accaggctat tccatcattt taggtgtttc |
| 102001 | tagggtatag agtaaatgat aagaccagtg actcccatga taaatgtgca ccatggtgaa |
| 102061 | cttcctttgc tgtaaaatgt catcttggtc ctagtctata tcgtaagggg caccatactg |
| 102121 | atagaccagg tactggtgag cccttggatg gtggtactgg tagaggaact gcaggaagaa |
| 102181 | aaggtaaatc catactcaga atatgtgttg attctggtaa ggacacgttg cttttccctc |
| 102241 | caagacagat ggttccgata gatggttgtg tagctaccct ccctgaggaa cggtactatg |
| 102301 | tcaaggtctt ggcatcagat tccgtggctg acaggttgga aatttagcat tgacagtagc |
| 102361 | tgaattatct tttgtaagtg ggagctcaaa tatgaccatg catagcacca tagtgattgc |
| 102421 | agcactagag acactattta tgggctttcc tgcacaagaa ctggggtggc taaagacggc |
| 102481 | ccggctaaaa ggcaggatgg atcatcctga gcacatggtt gttgagagtc ttctttgcag |
| 102541 | tcgggcggta gtgtgagatc tgctttgtgt ttatttccgt agggttgtcc acatacattt |
| 102601 | ttttccccac accttttctc tgagcttcaa atcttttttt cttgtcctgt cgaaatggcc |
| 102661 | aagccattca ctactgctta gaagccagtg catacttaag gatctggtct tttcttccat |
| 102721 | atgaaatgaa taactaagtg tgttgctcat agttttcccc actgggagga tttcccttta |
| 102781 | cctctcttct ttggggccac ctcaagtgag gatgaaatgc aacagcagac tatctctggc |
| 102841 | tagaggcaat aaatcacact agcccaatta tgcaccaggc ctgagctgtt tcctccacta |
| 102901 | ctgattgttt gtaggtagca gttgtgggag cttctgtgga acagattcag gtggtacagc |
| 102961 | tgctcaaact cataactcac ctgcaatgtg ttctgaaaat gtgtggctta actgcatcta |
| 103021 | ccctaaaaga acaagttggt gagtgatgag atgagtggga agtagtgagg atgacctgga |
| 103081 | ttttccattg aggaagtggc caagtcctgc ggacaaattg tacctaggaa aaggtacaaa |
| 103141 | aacaggagaa tggatcatgc gttcagtatt ggaactgatg actattaagt tgctgtgggc |
| 103201 | atctgaatat agatgttgtg atggttttaa aacatgtctg aaaattcttt gacactgttt |
| 103261 | ccatcaagag gtgatgtctt tgtctcctcc ccttgaatct aaatgggcct ttgtgacaga |
| 103321 | tctgatgaat agaatgcagg aatgtgatgt ccaaggctag tttagaaaag accatgtttg |
| 103381 | tttctctgga gacacttgct ctgggagcta ttagtgtcct tccaccaaag ccccccagga |
| 103441 | acacccctgc agctaaacaa attggattta ttgcttattg tagcaagaca gaacattcac |
| 103501 | cagggggaac cataggttat ctcagtaaga gggttttaga aagaacctat tataagattt |
| 103561 | gggctttggt tgggtgattt gggggaaggt ttaaggaatc aggggtggcc aggcacggtg |
| 103621 | gctcacgcct gtaatcccag cactttggga ggccgaggca ggtggatcac gagatcagga |
| 103681 | gatctagacc atcctgacta acacggtgaa accccgtctc tactaaaaat tcaaaaaatt |
| 103741 | agccgggcgt ggtggcgggt gcctatagtc ccagctactc aggaggctga ggcaggagaa |
| 103801 | tggcgtgaac ccaggaggcg gagcttgcag tgagctgaga tcgcgccact gtgctccagc |
| 103861 | ctgggtgaca gagcgagact ctgtctcaaa aaaaaaaaaa agaaaaaaaa aaaggaatca |
| 103921 | ggggtttggt ctagattgaa tgctctcaga aaatgggagt aattctaggg ttgtatattt |
| 103981 | tataggtggc atagtgacct tgttttgtct gtccttacac aaatgatgaa gtaggctgat |
| 104041 | tttgtttcat tttatcttgg tcgcagagta actttgtctg aggttggtgt tctataagat |
| 104101 | tgtatatgtc caacaagaga atgacatggc ttagctgtga atgtcagatc agttctggat |
| 104161 | atgagaggct gatattttct ttttgagctt tcagttgtca tgtaaggagt gtggctacca |
| 104221 | tgaggccact gcatagagtg attgtatacc tatatataag agagatggtt tggagttcaa |
| 104281 | gcccccagct agtcaagtct tcccagccca ggagacagat gttcgaatga aggagactta |
| 104341 | ggtaatttca gccccagtca ctgtctgacc acaactgcat gagagaccct gagggagaac |
| 104401 | tgctttgctg aacccagtca acctccagat ttgtaagtaa aataaatggt tatcattgat |
| 104461 | tgaagtcact gttctagggt ggtttttcct acagtaatgt cattgataca ggtgtctggc |
| 104521 | aggcagttgg ctctagaggt ctggagctaa ggagaaagat ctggcttgga gatgtggatc |
| 104581 | aggaagtcct tttacaagga gaaaagtgct tgaagtcatt tgagtggatg acatcacctg |
| 104641 | aaagataata tacattgaga aagaaaaaaa taaaaagcca acaatagcac ctttagtaac |
| 104701 | aacactgaag agagcaggaa gaaataaaga aacatttgca aggagacaga gaaggagtga |
| 104761 | ataaggtgat caaatggcat ccatccaaga gatgatgtcc aggaagccaa gaatgagagt |
| 104821 | atttcagaaa gaagagtgtt gtccacagag ttaaatgcta tggagagaga tggagtaaga |
| 104881 | caagattgat tagcaccaat gagctttcat tgttgacaaa tgcagtttga gggaaactgg |
| 104941 | gggctaggga gtgatggggc agagaccaga atgcagtggg gtaaggaggg gtaagaagat |
| 105001 | gagaagaatg ccaaatctgt gctgtttgcc acatcatggg ccctctctcc atactattta |
| 105061 | tgtgtgtata atttttttct acaatttaat aatgcattaa accatcacat cacatcacat |
| 105121 | cacaaaccca acaattccac aatagcatgg gtagatcata ccctggtgta tttttaatgt |
| 105181 | tatactttaa ccggtagttt tgagtcataa atgtactact atgttgttgg tttttttttt |
| 105241 | ttttttgggt ctgtcattat agtaataact ttaaatctct tattgtttat ttctcttgca |
| 105301 | attaaaatag ttcatcattt aaaatagtac ccagtgttca gtgtccattg gtgccttgta |
| 105361 | attacttcag aaaaacagtc tcagtttaaa agttataaac tcttaatgcc tctctgcagg |
| 105421 | aggaatagct tccttctgcc agagcggtct ggggagcatt attctagtca taccctgcta |
| 105481 | attcattggc ttgattgtca ggggtcctga tctagttcac cctcctggga ggctggtgtg |
| 105541 | ggaccctgct tatcccagtg ggggtcaagg cctccttgac aacagtgaat gggttgctag |
| 105601 | gaggctgcgg aaagaaattt ctctagttcc atccacaagt agatcccact gcagtggcct |
| 105661 | catttggctc ctctaatcct ctctttccca ccttctttca gggcaagtct caccctattt |
| 105721 | tcttcattac ttgcttgtgg tttccttgcc ggagatgctt ggaggcaagc attatgacaa |
| 105781 | ggatgggcgc gggtgggagt aaggccttta aacgaagagc tacatttcaa agaacttcaa |
| 105841 | atgtgtattt caaatgtcac ttccaaatga ggttgtacac acagacagaa acgcaattaa |
| 105901 | cagatttgga agaggccacg tagcatgcat ttgaaactcc tgttgcattc cttggctatt |
| 105961 | cttgtctgtg gcatcttttt aacaaatcct gtagttacct tgtaaatacc atcatagaat |
| 106021 | atattgtatt taaaaaacat tctttactca gatatgaaag ttgaaaaggt actattattt |
| 106081 | ttaaaaatct gtattggatt tttttttttt catattttag gatgccagaa gcctcaaaaa |
| 106141 | tggaaaaccc cctgtgcttc acatctgaaa atctctgctg ggggcagcaa ctttgagcct |
| 106201 | gtggggaagg aactgtccac gtggagtggt ctggtgaatg cttaaggagc tgcagaaggg |
| 106261 | aaggtagtga ggagacagtt aaatattgag cacgttttgg tgcctagcat tgtactggcc |
| 106321 | tttcacatgc tatgtttaat cacgcaggat tgtatggaat gggattgtac agaatgaggc |
| 106381 | ctgggtttgc taaatcctgg gggagattgt ctaagcbgtc acttgaaggg aaaactgtag |
| 106441 | catgbgggac ttaaaaacag cttgggatgg agtttgaggt agggcgagag ggaaaaagat |
| 106501 | cttggcagat acattctgaa caaatacttg tgtcatcctc aactgtatag tttttatgac |
| 106561 | ttttcctgtg ttcatctggt tggcagatga atgcaaaatg ccttttagct tcatggaagg |
| 106621 | cacacatgaa tcatggctat gtgataaaca gaagaagcca cgtttcggag ggtttctggt |
| 106681 | gtgtgtacgt gtgcacttgc atgtgtgtgg gcacaccctt gtgccaaatg gaccaccagt |
| 106741 | ttaaatcgat tttcaacagg gcagatttca tatgcttctt tagtgtggcc caagtcaatc |
| 106801 | tatttttaga aggggaaagt agagcatgtt ctgaaagttc ttttcttctg ccatcaggga |
| 106861 | ttgtagtact ttttatttat agtaatttca ggtctctaaa tacttcaagc aaaattaatg |
| 106921 | aggcaaacaa aaaaaattag gtaccagata attggatcat gtgttatttt atagagagct |
| 106981 | ttatttatct tgcctttgga aagtataatt tgtatttttc aaaattatga ttagatctaa |
| 107041 | ttctttttca agatttactt aaaataaata tttctgccta ggcacaagac tgtgtatagc |
| 107101 | acaactggcc ttgtattatt gacttgatga tgcaaagaaa aatatataag aatcagtttt |
| 107161 | ttttaaatgt gttaatattt atcataatgg aaatagtctt actaattagc aataactaga |
| 107221 | aaaatgtcta ctatttattg agccactact atatgccata ttctttacct atgttcattt |
| 107281 | tctcttctat attcaaaata atcctataag gtgtgcttta tgatcaccat ttgttccaat |
| 107341 | agggtctcaa ggacgttagg taattattcc tatgacattg agcctatgaa tggcagagct |
| 107401 | gggagtttga acctaagtct gatgactctg aagcttatag tctttctata agcttcttca |
| 107461 | gtctgaagct gcccctcaaa gtcatggcaa taactgagaa tagcattcag ttttacagct |
| 107521 | aggaaggtag ttgtagttgt gtttattatt caatactgtc catattcaaa gaaccattca |
| 107581 | ttgagcttct attttactcc agtcacggtg ataaataatg cagaatctag agatcaaaga |
| 107641 | taaaatggcc ttgccctcaa ggaacccatg agctagttgg gaaaactaat aggaatatta |
| 107701 | atgattataa tgcagaatgt taggtgcaat gagagaggta acaaggtact actggggcct |
| 107761 | gacaaaggcc accgtttctg tgtgtgtgtg tgtttatgtg tgtttgggaa aaggcaaaag |
| 107821 | acacttgaga taaagggaac aacatagaca aaatcaaagg cttgagagca tataacttat |
| 107881 | atgagacata gcaaattgtt tgctttaact agaaaatagt ggttatgtgt ggcagactat |
| 107941 | gagaaatgag aatgtaagtc cttgagaatg ataactttag aaattctaca tttgggatga |
| 108001 | tcataacctt ttaaaattgt ctcaatatga tagatatttt ccttctgttt tggggtatct |
| 108061 | gtctttttat tttttatttt tttgaggtgg agtctcactc tgtcacctag gctggagtgc |
| 108121 | aatggcgtga tcttggctca ctgcaacctt cacctcctgg gttcaagcaa ttctcctgcc |
| 108181 | tcagcctcct gagtagctgg gattacaggc gcctgccacc atgcctggct attttttgta |
| 108241 | tttttaatag agatggggtt tctccatctt ggccaggctg gtctcgaact cctgacctca |
| 108301 | gatgatccac ctgcctcagc ctcccaaagt gctgagatta caggcatgag ctaccacgcc |
| 108361 | tggcctgggg tgtccatctt ttaaagacac actgtaagaa tcataatatt ttcccaaaga |
| 108421 | agaaatgtaa ttagtacaca attacatgtt aaaactaggt gttattggta attaaaattt |
| 108481 | aaaaaaatta acccaaccaa ataataaaac taatgaaaat atttaatatt ggtaagaaca |
| 108541 | agatgcgata agcatatttg tgttttgctg attggtctat aaagtggttc aaaacttttg |
| 108601 | taaactatat ataagctatt ttaaatgttt atgccctttg attcaatagc actaggtttg |
| 108661 | gtactttata ataggaaagt tattagaaat atttactgca gggtttcttc aatgatgagt |
| 108721 | tgtaagaatc agcctaagta gctatggtac atcactttga tgcaacttaa tgtgtcatta |
| 108781 | aaaatcatgt ttatgaataa cattccagat gcatttaata caattctagc tgaaaaaaag |
| 108841 | atactgaaac attttgtgtt tatatatgtc tgcatatgta tctatatata tccctctccc |
| 108901 | tgtcaatcta taaattaaaa actatacatt aaaaactgca aattaaaact atatactaaa |
| 108961 | gaaagaaact ggaaagaaat ccacagaatg ttaataatca tggtcattgt gttgagtggt |
| 109021 | aggactatgg gtaatttttt ctttctattt ttatacattt ttcacttttt tttttttttt |
| 109081 | caatttgagg cagagtctca ctctgtcacc caggctggag tgcagtggaa cgatcttggc |
| 109141 | ttactgcagc ctctgcctcc gggttcaatc aattattcta cctcagcctc cagagtagct |
| 109201 | ggaattacag gtgcacacca tcacgcccgg ctaatttttg tatttttggt agagacaggg |
| 109261 | tttcactatg ttggtcaggc tagtctcaaa gtcctcccaa agtgctgggc ctccaaaagt |
| 109321 | gcbgggattt ggcctcccaa aatgctggga ttacaggtgt gagcaccaca cccggcccat |
| 109381 | ttttcacatt tttaatgatg tttttaactt taaaagtaaa aatttgtaat ttaaaatttg |
| 109441 | tttaactttt acaaataaaa attacaaatg caaattaaaa ttgctatata tttttgttac |
| 109501 | tggacaagaa aagatgcatt atagagtctc gttttatttt gttttctgat aaatctattg |
| 109561 | ctggggagca tgtgcgtaat tcgttttaaa aattctcagt gttaactaga tttcttttgg |
| 109621 | gatagctctg ctgaactgga atgagatctt cttccccaga gccacttgct agtttgattt |
| 109681 | tctagaaaga gagaaattat agaaagctac aatctacaaa ttgctatgta ctacagtcta |
| 109741 | ctaaatagta taatacttta ttttgcaaac tatatctctc agagtacaag gctccacagc |
| 109801 | tagtcttgca ccaaatatat gaggttcttg aatagtcatt ttctcaaagt tctcatctct |
| 109861 | ttacaaagca agttgagggg ggaagcagag agagcactct ggtgcttcca aaagcatcag |
| 109921 | ccatccacac tctgcctatt gaaaacacca aatctgagca tgtgtgtcat tgtccaggaa |
| 109981 | taaacaatca caaaaaggca tcaatgaggc ctataaaaac aagagcgcat gcaagaagat |
| 110041 | gggattgtta tgaaacagga gcacaaggct actaaaagag ggcaagccta aaggaaaagt |
| 110101 | caccagggtg agatggaaat agatatagga agaatagtga acggtggcaa ggaagtaaag |
| 110161 | gaatacaaaa gtaataaaat atccattgca ttagtccgtc cttgcattgc tgtaaagaaa |
| 110221 | tacctgagac tggataattt ataaagaaaa gggtttattt ggtttatggt tctgcaggct |
| 110281 | gtatgagaag catggtgcca gcatctgctc ctggtgaggc ctcaggaagc ttctattcat |
| 110341 | ggaggaaggt gaagggggag ctagcatatc acatggtgag agatggagtg agagagagag |
| 110401 | agaaagagag agaggagatg ccagtctttt aaataaccag atcttatgtg aactcagagt |
| 110461 | aagaactcac ttatcatgag gacagcatca agacattcat gaggaatctg accccatgac |
| 110521 | ccaaacacct cccactaggc ccacctccaa catgggcagt cacatttcaa cataagactt |
| 110581 | ggagaggaca gaacatccaa accatatcac ccacattgag ggagcaagga gcagactcca |
| 110641 | tactgcagaa cacacatggg aaacaaactt gagaagtttc cccagggcat agggtaagag |
| 110701 | gacgaggggc tggaaaaaga aaggtaatgg atatagagga cagagaatgg agttcgaaga |
| 110761 | tacatctaag aactttacat attcctaagg aacccacaaa gataaaacaa acagagcaag |
| 110821 | tatgaaagat gtaatagaag caaatgaccc tgcattgaaa atgatcaaag tatgcagatt |
| 110881 | ggaaaggctc acaaattcca ataaaaagaa ttgaaaacaa aaaaaaatgc tgcaataaca |
| 110941 | ttctttaaac tatattaatt gtaaggtttt tacaaaaata agtactcagg cagtagtaaa |
| 111001 | aagtttgcga ataaagaaac caaaattaaa ctctaacttt tcttatgtaa taccaaattc |
| 111061 | cagaacttgg aaacatatct gcatgcttta ccagggacca gattatgagg cagttattta |
| 111121 | agattagaaa agttctcttt cattggtaaa ggcaacagaa agatatattt tagaggtaga |
| 111181 | agctctctaa catagacact attctgccaa aaaaaaaaaa taagataaat gtaacaaaat |
| 111241 | aaaatgagct tcaaggtgta ttttggtcac tgagagatga ttcaaaagaa gactttgaac |
| 111301 | aatgagaatg ttaacattta aaagaatagg tggaattttt ccttactcag tttgttcaat |
| 111361 | aaaatcatgg gtccactgta acctgatata tcttgttgct taaagggaaa gcttggccct |
| 111421 | accttttctg ctttcttctg tgttcatggt gtagaaaatg tatttttgtt aaccaattat |
| 111481 | ttacttcaca cttgaggtag actttgttgc catgttggat ggctattttg ttaggtcaaa |
| 111541 | cagttttctg ccacatgcct atgtgatttt aaataatgta gccctcaccc tgagcttctg |
| 111601 | ctatagggac cacatgcttt gtggtaacca ggtgctgcca aaattggatg atagcaggct |
| 111661 | cctgacccat gcctgtcaag tcataggtgg ttaaggtcat gggagttgga gtcagactgt |
| 111721 | ctggttccaa atccaaggtc taccagttga ttttgacctt aattttctta ttctgtaaaa |
| 111781 | tgagtttatt gattgttccc actcagttcg tttgaggtga ggattaaatg agttaatacc |
| 111841 | tgtaactttt tgactggcac aagacacaat cctattacat gttctgaaaa aaaattctct |
| 111901 | acatgaacca aaggaatgaa ttctatttcc tccactgcta ctacaactca acacttctaa |
| 111961 | tcaccaaatg tgtggaggtt tttctacatc agtttgtcag acacctacta tgtgtcctat |
| 112021 | aattcagttc agttctgaca ccatctacat ggaaacaaca tccgatccca tggactaaaa |
| 112081 | gctcagtctc ataagactgt ctataatggc tcaagtgggt tcttcttgcc tgctgcacag |
| 112141 | aaaaaccaat acatcaaggc agtggtgttg cagtagagaa agcatttgat aatcacaagg |
| 112201 | ccagccaagt ggaagcatgg gagataattc ttaaatctgc ctccccaaga gctcaggggc |
| 112261 | tagggttttt aaggataatt tggcagacag gggactaggg aacgagtgct gctgatgagt |
| 112321 | tgtggatgaa atcataggag tatccaaact gtcttcgcat gctgagtcag tttctgggtg |
| 112381 | gaagtttctg cgtgggagtc aatttcttgg catgagtcac aggtccgggt ggagtcagtt |
| 112441 | agttgccaga atgcgaaagt ttaaaaatat ctcagagacc aatcttagat tttgacaata |
| 112501 | gtgattttat ctataggagc aagaggggaa gttaaaaatc ttgtgacctc tggctacatg |
| 112561 | attcttgagc agtaactatt atagaaaggt aagctaggga acaatgtctg gttatcattt |
| 112621 | aattacacct acatcttagc agaatttaag ttcttctcat aagcccaacc ttgtggactt |
| 112681 | tcattagtct tacaaaggca gtttcagtcc cccaccaagg agggcattag tttcaggtag |
| 112741 | ggactgttat catctttgtt ttaaagttaa aaaaggcagt tagcttgtga tgttagaaga |
| 112801 | aagatgtcag atttctctca ctgtcataat ttttgcaaag gtggtttcat ggccccactt |
| 112861 | gaaatgagaa tgggaagtcc aggttttcac ctgtgcttta gactgggtgg agataaatta |
| 112921 | aaggttcaca ggacctcctc ctcagatttg accatttgct agaatggttc acggaactca |
| 112981 | gaaaaacagt ttacttattt gattaccagt ttactttaaa aggaaattac aactcaggaa |
| 113041 | gagccagatg gaagagaggc atagggcaag gtatgtggga aggagcatga agcttccgtg |
| 113101 | cattcttggg ctcatcaccc tctcagcacc tccatgtgtt cagcaacctg gaagctcttc |
| 113161 | gaaaaatgtt cttaagccag gtgtggtggc tcacacctgt aatccccgca cattgggagg |
| 113221 | ctgaggtggg tggatcatct gaggtcagca gtttaagacc agcctggcca atgtggcgaa |
| 113281 | accccgtctt tactaaaaag agattagcca ggtgtggtgg cacatgcctg taatcctagc |
| 113341 | tacttgggag actgaggcag gagaattgct tgaactcagg aggcagaggt tgcagtaagc |
| 113401 | caagattgtg tcactgtact ctggcctagg tgacagagca ggactccgtc tccaaaaaaa |
| 113461 | aaaaaagaaa gaaaagaaaa agaaaaatgt tccttcagat ttttatgagg gcttcattgc |
| 113521 | atatacatgc ccctccctgg aggttggtct ggaggttggg ctgaaagttc caactctaac |
| 113581 | cacatggttg atttccatgg caacagccct gcttatcatt agggacttcc caaaagtcac |
| 113641 | ctcattaaca caaactctgg tgtgactgaa taacaaaaga tgctcctgtt acctttattg |
| 113701 | ctcttagaaa attccaaggg ctttaggggc tttgtgccaa aaacaaacac tatatatatc |
| 113761 | ttattataaa tcacactatc tcacattatt attatttaaa atgataagtc agtcaagctc |
| 113821 | tcttttcttg agaatttgat ttgggaaact tcgagaatga ggcaaggagc agtgggaata |
| 113881 | ggagtttaaa gtaagcatag aaagcataga aagaagctag ggaatagatt aaggttgcaa |
| 113941 | ggagggataa caaatggaga ttaggaaata gtggagactg tgattaagca gagcctgtca |
| 114001 | ttaggcattt ctgatataaa cccagatgct gtcatatcac ctcactgaat gcttgccctg |
| 114061 | aaacacttgt tttagtgcag ataaattcat cacctaagga tggcttatcc tttctatggc |
| 114121 | cattgaactt aagagctcca ctaaatagga taactccctt tatgcbggga aatctaccaa |
| 114181 | aattacctgt gtcagaaggg taagaaaaga gaatccagga tccagaatgg gattgaagtg |
| 114241 | atctcccatt ctttttgtga tatttagact gccttctgcc tctccaatcg acagaataaa |
| 114301 | gaccaaactt ctacccgggt gggtagggct tatcctgagg atggagactt tctaagtata |
| 114361 | gatggtcaag aaactggtgc acatttaagt tagacgcatc tctaaattgt ctgggcttag |
| 114421 | actattctaa gaatgaataa ttatgaaaat tgaggcagct cagagactca ttttctaaga |
| 114481 | tttcaatata tgattagcaa agtgctatag aaaaaaataa aatggcacag tttggcagtt |
| 114541 | ggcatcttgt atctttctgt cccaggtctt tcttgtgctt gtaattcttt cattgataaa |
| 114601 | gaactcagct atctatccag gcgtgatggc tcatgcctgt tatctcagca ctttgggagg |
| 114661 | ctgaggcggg aggatcactt gaggtcagga gttcgagacc agcctggcca ccatggtgaa |
| 114721 | acccacatgg tgaaacatct gtactaaaaa tacaaaagtt agcbgggtgt ggtggtggga |
| 114781 | gcctgcagtc tgagctactc aggaggctga ggcaggagaa ttcctcgaac ctgggacttg |
| 114841 | gaggttgcag agagccaaga ttgcgccact gcactccagc ctgggtgaca gagcaagact |
| 114901 | ccatctcaaa aaaaaaaaaa aaaaggattc agcaatgtgt ggttcttttg aatctatggt |
| 114961 | atgtattagc acatcacagc agagcagagg ttctcaacaa ttgattttat tccccagggg |
| 115021 | acatttggca atgtctggag acaattttgg aacttagagg ctgatgctat tttggaactt |
| 115081 | agaggcttag atgctattgg tgttgtgggc agatgacaag agagattgca aacgttctcc |
| 115141 | aattcagaag gcagcctcca caaaaagaat tattcagtcc aaagtgttaa tagtgctgtt |
| 115201 | attgagaaac catgccctag agaagcagcc tagaactttg agtttttcct tttttttttt |
| 115261 | tcaatcaact aatgagaata aatgtggagg agacgggcaa aaatgtcagc agccccgtat |
| 115321 | ggttttcaaa atcatttcag atatttgcta ttcaccagtg tcagccaatg tgtttatttt |
| 115381 | tgaaaggtca gaaatttcat agggccagat tactaaaatg gttattatta tttttttgtt |
| 115441 | ttcaagagct tatgttagtt atctagtata gagaagtcta ccatagagat ccctttgttc |
| 115501 | tgagtactgg actttttcac ttaccaaaac tctcctactc tatacgttct tcaccgtgat |
| 115561 | aatccaagaa gtctgaatcc tccccatggc tctcccctgt ttccatcccc agtcggtggg |
| 115621 | tttcccacag gtctccagtg tgctttggaa gtaggaactc ctaacagatt cacagtttga |
| 115681 | acatggtagt cctctgagct gttcagtatt ttaaatctct ctgcagttag ttataatcat |
| 115741 | tcaactcttt tagtcattct tctaatgtca gtatagataa ctaaaagatt gtaatattag |
| 115801 | aagacctatt tcccagagac cacaaagaca atctcatgga agtcccactg tagtaaatag |
| 115861 | agtctatttt ctacccagca tctggtagag taattcagac atgtgttttg acagtttgcc |
| 115921 | tgaaagtaac ttgacaaata attttactaa agaatcctag aaagtcaatg gcaacatttt |
| 115981 | gttcattcta agttgttcaa gccacgtcct tagatgtggt tgattcaaat ttcttcagaa |
| 116041 | ctggaaaagc acaagagaat tagtattcca gtaataagga atcatggatt gtggcagtct |
| 116101 | ttttaaaaca taaactagtt tagcacataa gtggtggcct agtacatttt aaagtggagt |
| 116161 | ccaagggaag tttcttgaat tgctgtagtt cttatggtgt tctgctgaag ccgtgtagat |
| 116221 | cttatggtgt tctgctgaag ccgtgtagat attgatcatg ctgcctccca ccaccacccc |
| 116281 | cttcattcca gatctgctca aagacaactt agaaggtcct atcctggtct cctgtctgaa |
| 116341 | acatatactt tctctcctcc cgcccccagc ctgcccatac tattccaatc cttctctacc |
| 116401 | tattattcct ttgttttgtt ttcaatataa aaatcttatc tatttcttta tacgttaatc |
| 116461 | atctatcact ccccacacac tacaatgtgt gcattcattc cctgagtaac tgaaacctag |
| 116521 | aggcccggga gtcatttttg aaacttcctt tccttggctt tctcctctaa ctgctcttcc |
| 116581 | aattcatcgg ctggatttga ctattctaat tccaaatctg tctggaactc gtgtacctct |
| 116641 | cgcagtgtcc actgcbgttg ttctggtctg gggcacaatc gacactcatg ctcaccgaac |
| 116701 | tgcagcagcc cccttcctgc tgcttatttt gaccacacct ctttttgaac ctattctgta |
| 116761 | caaaggagct ggaaagagtc agtaaaaata cagagcatag tgttcattgc cttgcttgga |
| 116821 | caggacctgc catatgtgtc ttctctatag tattggctga atgcataaac agcgagaaat |
| 116881 | aaatgtgtag agagtaaatt gatagaaagc tgccctcagt catctcccat ggagagggct |
| 116941 | agtgatgact ggcgaaggtc acagagctac tatgtgttag attttggact aaaatccagt |
| 117001 | ttttctgaga acggtcaaga gtttatttat agaaaacatg ctgctttatc tcttaattcc |
| 117061 | ttctcactcc ctgcaaatta gtggcatttt agtttactta aatgcacaat tatttttaat |
| 117121 | tttgattgaa aaattaatac tcatttactt ctgaaaacta tttctttacc gaagagcata |
| 117181 | gagaaataag ggagtaattt atcaacctac cataggtgga atttttactt tcatctttat |
| 117241 | actttcttct tcattattgt tttttttaaa aaacgtaagt atgcatttat ttttataatc |
| 117301 | aggaaatatg tgaagttata taaatgtgta atgaatttca ttactgggaa ctaactgctg |
| 117361 | gtgatatttt acacttgatt ttagccaaaa ggccgagaag cgatgctggt gatattctaa |
| 117421 | tgtactataa cttattctaa tatttcatgg gatttatttg caattagtgt gatataaatt |
| 117481 | tccataatgt atggaaagat atattagaag atgctaacca tgggcttaag aaagtagatt |
| 117541 | tcataatttg aaacacggcc cacacaatta ataaatataa gacatttggc actctacttc |
| 117601 | taatctcttg atttttttta tagcaactgt ctttaagaac cccagcatat tcatggattt |
| 117661 | tttagaaacc taattatttc ctagaaaaat cctttgaaaa aggaaaatta tatttgacag |
| 117721 | ttttctaaag attttctgtg cagaagttgt atctggatat acatataaag ccctgaagta |
| 117781 | atctatacat tttatcgctg gtcttcagat atgttggcag agtcgctcgt gaaatatatg |
| 117841 | cttgaaatta atgtaattac tctgacattt gttattttaa taagcattct tagctaatac |
| 117901 | atagaggaat acattaaagg aactctaaca ccaaaattat cctttcttaa ttaaataaga |
| 117961 | aggactgcaa ttatttaaaa agtgtatgtc aaatctaagt tgccttcaaa tgtaatttaa |
| 118021 | ttttctgtta cttacatttt aaaatggcca tagctttttt cgttgttcat ctttcttaat |
| 118081 | tctttaggca ctacttaccc cccaactcca gcaaccaaaa ttaatcctaa tttgcatcac |
| 118141 | aataatttaa aatagatcaa agaaccaatt tcatagccta attcaaaagc atcatgcgac |
| 118201 | caatatgtag tattaataaa acatatttct ggttttgcca atccaatttt ttttttaatt |
| 118261 | aagtgcttaa cacagtgccc agcacagaaa aagcacttga tacatgtttg gtaatgtctt |
| 118321 | tgtgactgtc atttttacta atgttgtata ttggtactac taaagtctaa tgggatgctt |
| 118381 | gtattatggt gtgataatat agttaggatg accacttgtc atggctggcc tgtgagaatc |
| 118441 | ctgtttaata tctattgttc cagttttctc caacttaaca ttttagcact caaaagtatg |
| 118501 | tgatgtggag gataaatttt atggtcgcca atcctttatt gtaaagaatc gtgatgcaaa |
| 118561 | ggctccagtg tagtcatcac tcatctcttg atttaggcat ctaagctatc caggcatcat |
| 118621 | catgggggtg agcagcctga atgacagtaa gctttccaag tatggggaca tgcacttaag |
| 118681 | ataggtatag ttattccagt gccaatctcc tcttacctgc tgtatgtcaa gaatcaggca |
| 118741 | acatttagga aatgaaacca caagtctttg tctctttttt taccctttat ctcaaaatgg |
| 118801 | tttttacttg ggatttgttt ttttgttttt tgttttttgt tttttttttt gagacggagt |
| 118861 | gccgctctgt cgcccaggct ggagtgcagt ggcgcgacct cggctcactg caagctctgc |
| 118921 | ctcccaggtt cacaccattc tcctgcctca cctcccgggt agcbgggact acaggcgccc |
| 118981 | gccactacgc ctggctaatt ttttgtattt ttagtagaga cagggtttca ctgtgttagc |
| 119041 | caggatgatc tcaatctcct gacctcatga tccacccgcc tcggcctccc aaagtgctgg |
| 119101 | gattacaggt gtgagccacg gtgcctggcc tttagttgag atttgattat gaatgaaaat |
| 119161 | gtaaagaaat ttgctagatg tgtccatctt ttcatgtggc agacaatatg gactagatat |
| 119221 | atggtggtca aaattatgtt tgtgggtata gcctaatagc ctaaaccaat gacacttatg |
| 119281 | tggcagtttt atttatttat tttttctttt taagacaggg cctcactctg ttgcccagtc |
| 119341 | tggaatgcag tggtgcaatc tcagctcact gaaacctccg cctcctgggt tcaaatgatc |
| 119401 | ctcctgccta aacctcctga gtagctgaga ttacaggcat gagccaccat gcccaactaa |
| 119461 | tttttgtatt tttagtagag atggtgcttt accatgttgg ctaggcttgt tttaactcct |
| 119521 | gacctcaagt gatccacctg ccttggcctc ccaaaatgct gggatagcag gcgtgagcca |
| 119581 | ctacgcccag cctcaccctg gactttatga caatgccaaa tatatgcact gtgtcaaaaa |
| 119641 | cagtcctctt cactgtcctc cagtagaaaa agctcaataa tgggtctaca aactcctgga |
| 119701 | tttagtccag gctatgtaat ttgtggaact tagtgccaaa agtagggtcc tttgttcaaa |
| 119761 | aattattaag aatttccaga tggcaacagt ggaacagtca atgaagcaca ggatccttct |
| 119821 | gtccccaagg tcctgaacaa ctgcagaaac cttgtgcccg tgcattcatc cctccttctt |
| 119881 | ggatccttta cctgttgatc tccttcgttt tctttccaga caacaattat ggacaactta |
| 119941 | ttattaatat atgtgagcca ctgtgttcac tatcggaaat aaaaatatgc ttataaggta |
| 120001 | gtcccaaatc tttttttttt tttttttttt tttttgagag acagtctcgc tctattgccc |
| 120061 | aggctggagt gcagtggtgc gatctcggct cactgcactc tccacctccc gggttcaagt |
| 120121 | gattctcctc ccgcagcctc ctgagtagct aggattacag gcgtgagcca ccactcccgg |
| 120181 | ctaatttttt gtatttttag tagagacagg gtttcatgat agtggccagg ctggtttcga |
| 120241 | actcctgacc tcatgatccg cctgccttgg cctcccaagg tgctgggatt acaggagtga |
| 120301 | gccactgtgc ctggccccag atcttagatt ttggtgatta aggacttcac gaagtagatg |
| 120361 | aaataacacc cagaatttgg ctggtttatt ttctccttaa gatgctcagc tgtgattttc |
| 120421 | tgtatattag tctcaagctg caaattctct attccaggat cttatgatct gtgtcctaac |
| 120481 | tacatattat agggccccag tggtccctat gcctctggtt ctattgtcat cacacacttc |
| 120541 | ctgtttcatt cctatagaca gatttattca tgactaggga acagattatg ctagtaaagg |
| 120601 | tgttggttaa catgagttta aggcaagaac ttaaacgtaa atatctctag ggattggaca |
| 120661 | ggcaatatgc cttaaatagt aaagctatca ggtagggatt gactgcatgc ctgcagagga |
| 120721 | aactgctgcc tatttagcca cagaagatta ttgccatgta aaaatgtgag tatggtttgt |
| 120781 | cacatatttt taaagaaaag tcagaaatcc aaaaatttgt atgaaatttt taaacatttt |
| 120841 | atattgtcaa ttcaattttt aaaaagactc aatataggca gagaaaaata actacagccc |
| 120901 | aaggttaagc caagaagtat tgtttttcta ctttttcttc gtagtcagat ttgttcagat |
| 120961 | ataattcaga tgtaataaat aaacccttta agttctatga gttttaacaa acacctacat |
| 121021 | tagtgtgaca atcactgtag acaagatata gaataattct ctcgtctccc ctccaaaatt |
| 121081 | ctctcaagcc tctttgtggt taattctcct agctcctgac aatcgctaat aaatttcctg |
| 121141 | tctatagttt tgccttttca agagtgtcaa ataaatggaa cactactgta tgtagccttt |
| 121201 | tgagacaggc ttctttcact gagcacaaat aatttgactt attcacgttg ttatatgtat |
| 121261 | ttagattgtt tctatctaat tttcaaaggt tttttccttc ctttcttctc ctttcctccc |
| 121321 | tccttccttc ctttcttttt ttcttcttcc tccttttatt ctgccttttt tctctccttc |
| 121381 | caactttccc gcttttttag atatcacatg tacagaagta gattaatctt gatgtttatt |
| 121441 | tcataacata ctctcatttg ggcccatgca tggcttgtat ttcaatagct ctattgagat |
| 121501 | aaaactcata tacattcaca tggagaaaca gccctgtgga gggaaagaaa ttgatatgca |
| 121561 | gtaaactaca catactcatt tacaacttga aaagtttgcc atatgtatac acaatgaaac |
| 121621 | catcaacact ttcaaggtaa taacatatct cagtttcctt gtgtctttat gttattcttc |
| 121681 | cctccttcca tctgatctgc tttgtgtcac tgcattttct agaattttat gtaaattaaa |
| 121741 | tcatatagca tgtgctcttt tttttgtctg gcttctttca tgcagcacaa ttattttgcc |
| 121801 | attcatatca gtttttgtgt gtatcaatag ttcattctgt attattacaa attagcattc |
| 121861 | aattacatga atacattgca atttattcat ttgtgaatgg acattgcatt atttccagtt |
| 121921 | ttggctgtga caaagattca tgtggaagtc tgtataggga catatgcttt catttctctt |
| 121981 | gggtaaatgt cttagagtag aatgcctaag tcatatggta gatgtatgtt taacttttaa |
| 122041 | agaaattgcc aaattgttgt ccaaagtgtg taccatttta cattcctggc agcagtgtat |
| 122101 | gagagttcta gttcttcacc atcccccttc caacacttgc tatagtcagt cttgcaattt |
| 122161 | tagccatttt aataaatgtg tagtgatatc tcactgttgt tttaatttgc atttccctag |
| 122221 | tgtctagtta tgttgtgtct ttacttttgt ttatttgcta tcattatctt ccttggtcaa |
| 122281 | atatctgttt aataattgat acatttttta ttggactgtt tgttttctta ttagtaactt |
| 122341 | tggagagtgc tatatatatt ctggatacaa atcctttaac aaatgtatga tttgcaaata |
| 122401 | ttttctccca gtctgtgatt gtcttttcat tctcctagca gtcttttgaa gagcagatgc |
| 122461 | tcttaatttt ataaagttca ctttatgttt ttttttattt tgtggattgg acatttggtg |
| 122521 | ttatatctaa aaaaaaatct gcctaaccca tagccttatg tgttttcttc tagaagtttt |
| 122581 | atagttttag gttttacatt tgggtctatg gtccattttg agttaatttt tgtatatggt |
| 122641 | ataagatgca gattgaagat ttttttttaa tatgtggaaa actgattgtt ccagcactat |
| 122701 | ttattgaaaa gactaatttc tccattaaat tgtctttgta cctttgttgt gaatcatttg |
| 122761 | cctatatatg tgtgagtcta tttctgaatt ctcttttctg tttcagtgat tcatctatgt |
| 122821 | tgatgccaat gctacactgt cctgataact gtagttaata aagtcttaaa gttaggtagt |
| 122881 | aaaagtctgc tattttcttc cttttcaagg ttgcattttc ctattccaag taatttgcat |
| 122941 | taatcaaaaa gtacatggaa aatgtgtatt ataacaaaag gtatggaatt ttaaaatttt |
| 123001 | caaaattctt ttgcatcaaa gtaaatgtgt actaacttgt tataatatgt gtgaacagga |
| 123061 | gctagtttga ggcactaaaa aggataaatc atcaatttaa aaacagcccc tatcagagca |
| 123121 | acatgaattc tgataaaatt gaagcaagaa caaatatcaa atttatcgtg aagcgtgggt |
| 123181 | gaaaaaaggg tgaaatcatt gatgctttat gaaaaattta tggggaaaat gtcacattat |
| 123241 | caaacagata actcatttta agaacagatg atatgatgtt gaagtcgaag cccacagcag |
| 123301 | cagaccatcc acattaattg ataggaaaaa aattcatctt gtttgtgtct taattgaaga |
| 123361 | gcactgatga ttaacagcac aagtaatagc cacaaccata tacacctcaa ctggctcagc |
| 123421 | ttacacaatt ctgactgaaa aattaaaatt ggccaaagtt tccactctat gggtgccaaa |
| 123481 | accattgtgc ccagatcagc tgcaggcaag agtagagctt ttgacggaaa ttttaaacaa |
| 123541 | gtgggatcaa ggtccagaaa gatttcttaa aagaacatta ataggagatg aaacatggat |
| 123601 | tatcagtatg accctgaagc caaagcacaa tcaaaacaat ggctaccaag aggtggaagt |
| 123661 | ggcccagtca aaataagagc agaccagtca agagcaaaga tcatggcaac agttttttgg |
| 123721 | atgttcaagg cacttttctt gactttctgg agggtcaaag aacaataata tctctcatta |
| 123781 | tgggagtgtt ttgagaaagt caaagcgtta gcagaaaaac gtctggcaaa gcctcaccac |
| 123841 | agagtccttc tccaccatga caatgttcct gttcattgtc acgaaacaag ctctcacgaa |
| 123901 | ataaagctct aattttgcaa gaatttcaat gggaaatcat taggcagcca ccttacagtc |
| 123961 | ttgatttggt ttcttctgac tttttgtttt ctaatcttaa aataatcttt aaggggcacc |
| 124021 | catttttcct tagttaataa tgtaaaaaag actgcattga cataattcaa ttcccagggt |
| 124081 | cttcatttct taaggaatgg actatttggc cggtatcatt gcttacaaaa gtgtcttaaa |
| 124141 | cttgatggag cttatattga gaaataaagt ttatattttt cattttaatc ttttaattat |
| 124201 | atttttccac aaaatttttg aagtcctctc acatatataa atttttggaa tcagcttatc |
| 124261 | aagtcatgta catttactgc tatatcacac tctgttttgt gaatattcca aaattatagt |
| 124321 | ctatgattta tattgttgtg actattgcat aatttacata tcaatgtact gatgatcata |
| 124381 | ttttgcaata tttttgttat tgttattcta ttatgaacag tgctactaat ataaatagta |
| 124441 | tttgccacct catacacagg tgcaagttta ttgtaatagt cttagtatta aattttctga |
| 124501 | gtcatagttt agcaaaagct caacttttca caggatattg ctggattgtt ctccaaagta |
| 124561 | gctaagttat actcctatta gccgtatatg agagattcta atcatcttca ttcttcaaca |
| 124621 | tttactattt tcagacttac taattttgcc agaaaaaata catgacaatt catacccgta |
| 124681 | cctgtagtgg tcttgatttc catttactca gaagacattg gacttttctt cttatgttta |
| 124741 | tgggctatat tttcccttct tttatgatat tactgttcat gtttttgctc atcttattgg |
| 124801 | gttatgggcc attttatttt atttttattt tttatttatt tatttttttt tgagatggag |
| 124861 | tctcgccccg tcctgcagac tggagtgcag tggcactatc tcgactcact gcaacctcca |
| 124921 | atgggccatt ttatatccta acatatgaag tatctgttca aatcttttac catttttttc |
| 124981 | ctgtaggtgt gcttgtcctt ttcttgttat aataaaacag ttctttattt ttgatactaa |
| 125041 | tcttttagaa agtgttctgt tgggcbgggc atggtggttc atgcctgtaa tcccactctg |
| 125101 | ggaggctgag gtgggtggat tacctgaggt caggagttcg agaccaacct ggccaacatg |
| 125161 | gtgaaactcc atctctactg aaaatacaaa aattagcccg gtgtggtggc gggtgcctgt |
| 125221 | aatcccagct actcgggagg ctgaggcagg aaaattgctt gaacccagga ggtggaggtt |
| 125281 | gcagtgagct gagagcatgc cactgcactc tagcctgggt gacagagtga gactccatct |
| 125341 | caaaaaaaaa aaaaaaaaag agagagaaaa gaaaatgctc tgtcagtggc aaatatctct |
| 125401 | tacttttttt ttagttttct ttgaaacctc ttttaatgaa tagaaatttt tttattttaa |
| 125461 | tgtagtttaa ttcatctatt tttctttttt aattgtcttc agtttcttta gtcttgtttt |
| 125521 | cataatcttc tggatatgag tcttgcaaaa catcttttgt taattttctc atggtttttg |
| 125581 | ttataatagt atttagagtt attttatata tttatggtta atataaatca aattgcatgt |
| 125641 | tgttcttgct ctaaattaca gattcaataa tttgcaacaa aaccttatct ctttgtaagt |
| 125701 | ccttaagtta attaagtact ctggatatct tcacatataa atacttgtat cagctgtctt |
| 125761 | ctctcttact actccaatta aaatccagta tctagaatag ggaaaaacca ggtgaacatc |
| 125821 | acccttacag agatttattt taagacataa tttagggtgt gctccatact gccttggcta |
| 125881 | tgtactagtc tatatattct agaagggtca tatatgtgca caaattgatt tgtgtagcca |
| 125941 | aaagctgctc cagtataaat gtgccaccag gatccatttc aaaacattgc ttcctcttgc |
| 126001 | caaggttagt gcagctatgc ttgctatcac tcaagtaacc agagaatgcc agcgtccgta |
| 126061 | ctctcaaaaa gacagccttt tctgcaccat tacaattggt gtcttttgtc cctttctttt |
| 126121 | cactgatgga aatctttttt atcattccaa tcaaagatca ctaccttcct aggagaagtt |
| 126181 | tcaatagaaa gaaaaaaatg ttatacttcc tcagaaaaat agcactttct tcatatagca |
| 126241 | agttttactt tcagaaaagt tgagaaaata aatactatgc ccccaggttt cccgttattg |
| 126301 | gagattgatt gctatgttga atgtgctata gctttgctgc ttaaacccaa acgccaagtg |
| 126361 | caggagtatc ttctttacta acgcatttaa tttaccaagc acacttagtg gctggtattt |
| 126421 | cttacctttc taagggtgca ctcacttaca ctgccctcaa tatatgtaat taggataaaa |
| 126481 | ccatagaatg gaaggcatta aaaatgaggc aggaaagcac aggcagagtg ggatgaagcc |
| 126541 | agctttgctc tgaataggac ttatatgatc agtttagttt tattccaaac atgaacccca |
| 126601 | aattcaaccc ctttgacctg agtactccgt cccttaaatg gcaaactaaa cattcgtgaa |
| 126661 | aatttaatgg tgaggaaatg agtaccttct taagtttcag atggtgaaat ggcaccaggg |
| 126721 | gagcactttc agtggcaggc agaagtgtgt ggatgtgcta gatcaaacct gaaatatttg |
| 126781 | ttccttcatc ctgcagtccc tctccaaact agccagccac tgagaccttc tgacaggaca |
| 126841 | cccccaggat gtcacccaaa aaaggtattt acaaaatcaa gactgtctgt aggacactat |
| 126901 | gtctttctga gaggtataaa ggtatttgaa aactttggaa agtttgtttt acaatttttg |
| 126961 | ttccctcttt tggggctttc cctttttcat ttttttctgt gggtagtttc cctttgtttc |
| 127021 | ctgagaaatt gagaagggtt taatatctct ccaccttctt ctcttttatg gatgaatgat |
| 127081 | ttcaccaact ggtaagtgct aaaactgacc tcgctttcac tcagaaagac aatggaggaa |
| 127141 | aggaaaatgc actgagattt cagcatagca actcaaatgc gggctttatt ccacagcagt |
| 127201 | gacctattgt cagattggtg tgtgagacag tttttgaaag gggatgtgtt ctgcttccgt |
| 127261 | ttatgagtta agcaaagttc taaattaagt tgagaagagg aagcaggtaa agtcagggat |
| 127321 | agcagagaaa ggagacatca aaccctattg ttgtaggata tttatgtgaa ggaatgagca |
| 127381 | acgtgataaa acacattttt gcttgcbgtg acttgccata gggtgcattt tcagtactgt |
| 127441 | gtggataatg tgtggcatgt tcattcatca gtcattctgt gacatttatg tagcttacac |
| 127501 | ttggatctat tttcaacaac atttcagttc cctaaagaca aactggcaga attttcaaat |
| 127561 | aggaaaaacc tggacacaca catttgcttt tctgtataga ctgtctagtc cagataatct |
| 127621 | tgctatcagt cattttgtta gcttactcat ttaatcttag aatggaaagt ggaaacagag |
| 127681 | acctcattta gagataatct agtaaagcca tccagcttca ggctcatatc ttgggaatct |
| 127741 | gagcagtacc ctatttaata tgctcatttt attaacttta aacacctgga gaacatcatt |
| 127801 | attgagaagg tcattgcttt tgaaaaaaca aaaacaaaac aaccacttct tatgaggctc |
| 127861 | tacacatctt tccaaagaag ctattggaaa tggcccaaac tttcatatta actcttaaca |
| 127921 | gggtggcgtg gtttttcatt agtaagaaca ggattcaaat cttatggaag atggtagatt |
| 127981 | tcaacacctt agcatttttc tcaaccctgg gatcttcaag ttcctcaggc tatttaggta |
| 128041 | gttatagtgc tggcaaactt tttaagtgcc cagtagtttt tacaaaaact tgtaataaat |
| 128101 | ctgctcaggc tatcttaatt gccaaccatc tcattaagca agtcaaatta gaatggatta |
| 128161 | ttcctgctgt ttattagtgc tgcatattat ttatcattta ttaaccttat tgtgctcaca |
| 128221 | tagcaggtat tttaaagttt aacagcttta ttttaattat gaatgtaata tatgctgttg |
| 128281 | cagaaaatat gtaaacttta gagaaaatgt actaaatgat gcactgatga aaatacagaa |
| 128341 | tcccaccaca aaaatattat tatcaacatt tgggtattct cttccaaact ttttatatga |
| 128401 | gagttatgtt tggtttatac ataataaaat gggtaaaaat caataaatag aaagcaaatg |
| 128461 | tttttaaggc agtacttggg cttcataaga atggaaaaaa atgatagact tgcctggtgt |
| 128521 | ggtttgcata atgtcacaga atcataacaa tagctccatt attgagtgtc tattatgtgc |
| 128581 | caggttctgt acaatgttca gtgatgcgtc actgtgatga ctagaggtaa aggaaagata |
| 128641 | agtgatgcct tactatgatg acttccaaca agctatgaag ggacagaaca agcctttttt |
| 128701 | tttaactttt attttaggct tgggagtacg tatgaaagtt tgttacatag gtaaacatgt |
| 128761 | gtcacagggg tttgttgtgc atattatttc acacccaggt acctatgtcc agaacccaat |
| 128821 | agtttagttt tcttttctcc tcccctccct cattctatcc tcccccctca catagacccc |
| 128881 | agggtctgtt gtttccttct ttgttttcat aagttcttat cattatcata cttataaatg |
| 128941 | agaacgtggt atttggttgt ctgtttctgc attagttggc taaggataat gtcttccagc |
| 129001 | tccatccacg ttcccacata agatataatc tcgttctttt tttatggctg catggtattt |
| 129061 | catggtgtat tttatatata tagatatata gatatatata taaatatata tagatatata |
| 129121 | tataaatata tataggtata tatatgtcac atatatatat cacatataca aggatatgtc |
| 129181 | ctctagctcc atccatgttc ccacataaga cataatctcg ttcttgtttt atggctgcgt |
| 129241 | ggtatttcat ggtgtatttt atatatatat atctatataa aaatatatag atatatatat |
| 129301 | cacatatata tagcacatgt atctatatca catatatata tatatcacat tttctttatc |
| 129361 | cagttgggac agaacaagtc aactggcaag tccattgctc agcttgttga aatactctgc |
| 129421 | acagaatgca aggaaaaact gttttcatga ggtagcccat gaagcgatga agcaaggcaa |
| 129481 | atttatctgc ctggataacc tcctgtatgc tgttttcact ccatggagag tcaacacaac |
| 129541 | agacttctga gttgtattat cgagctcctt caacagggca ttgctgtaag atcctagatc |
| 129601 | ccacactcca tggtgtgatg ttttagccaa gtctggaagt agcacaggcc ctaaaatctc |
| 129661 | atgattgcag gttgtcaact ctgctgtagg cttgccactt caagggcaag tggttggttg |
| 129721 | gggctgggat ttgggcagag ccatagaaag aaagggaaca ttcaagggaa tttgatgatg |
| 129781 | tgcatgatgt ctctgtctga tacaaaaaga aaaaaaaact ctaaaaacat ttgatacata |
| 129841 | gaaatactag tatttggtga gattgaatgt gggaagatga gggataagaa ggtattaaga |
| 129901 | atgactccca agtttctgac ttggtcagtt gagtagaagg gaaattttta tttttatttt |
| 129961 | tatttttaaa atttcagtaa gtttttaggg aacaggtggt gtttggttac atgaataagt |
| 130021 | tctttagtgg tgatttctga gattttggtg cacctatcac ctaagcaggg tacactatgc |
| 130081 | ccaatgtgta gtctcttatc cctcaccccc catcctttcc cttgactccc caaagtccat |
| 130141 | tgtaacattc ttatgccttt gtgtcctcat aatttagctc ccaattgtga gtgagaacat |
| 130201 | atgatgtttg gttttccact cccgagttgc ttcacttaca ataatagtct ccaattcatg |
| 130261 | ccaacatcta ttattttttg attttttgat catgaccatt gttgtaggag ggaggtggta |
| 130321 | tcccattatg gttttgattt gtatttccct gataattagt gatgctgaac atctttccat |
| 130381 | atacttgttg gccatttgta tatctgagta gaaggtaatt ctaataaata aaacaggaag |
| 130441 | gcagcagaaa gaggtttgtt tgggatatgg cttgattatt tgcaagatat ttgctgtagc |
| 130501 | ttaggagaaa ggtggatgtt ggtgatactg attttgtcat tatctgtgag ttaaagtttc |
| 130561 | taaaatcacg tggcttccta gggaaagcat atagaatgac aagggaagat ggctagatgg |
| 130621 | ctagtaatgg caccctgaac aacttcagca tttagaggtg ggtggaggag gataagccca |
| 130681 | tggaagaaac agaaaggatg ggccagcgag atgagaggag aagctaaggg agtagacagt |
| 130741 | taccagaggg aaggtgggat cagttaagaa ccttagtatg ttgcaaagaa ataacctgca |
| 130801 | atgcggacca acccggggaa cgtctgtaaa aatgatgaca attcttaatt gtaatttaaa |
| 130861 | atgtaattgt attgagagct ctctctgtct ttgtctcatc ataatttgaa gcagattaac |
| 130921 | tacatattag ctagaaaaag ccctttgaaa ttttccttca atgtatcaat agattctatg |
| 130981 | actttttgta agtagaaact gcctattggt aaaatagcac ttaattgaga taatgcttgt |
| 131041 | gaaagccatt tctaaacttt gaattgacat acaaaataaa ggtggcaatc atcaccatgt |
| 131101 | tgctatactg tctttggcca tataaaattt ttttcaacaa tacaaagata agccttgtac |
| 131161 | aaattcttca aaattctaaa tttgtggtac ttgaataatg ttttactata tataaagatg |
| 131221 | aatagatagc atttcctaca ataaataaat aatttatata tcaatgtgtt gggattataa |
| 131281 | attctcatag aaattcactt tattaattca ttcattcatc tgatcacagt tcattcagca |
| 131341 | aataatttgt tttgttcttt ttaagtgctc tgggaagaag gtattgtgac agagtccctt |
| 131401 | ctctcaaagc gtttatagat tcatgtgttt ggggaaagta cagaacaatt attgaaataa |
| 131461 | aaccagagtc aggcacattg ctatgccagc tataaagagc ctatgaaaat taggaacatt |
| 131521 | gacacatttg ttcctaacct ggtttgtgct ttcaggattc ctctgaagtg gcagcactcc |
| 131581 | ttgggtttga aatgttcgtc agtaatgact gatggacatc aacaggtgaa tagacacaca |
| 131641 | aaaaacctat gaaacttaca taccataggt tactattcaa caataaaaag aaaaactgtt |
| 131701 | gatacatcta acaatgtaga tgaatctcaa aagcattatg ctattccttt ggctgataaa |
| 131761 | atggtgacac tcctttattt ctctttcttt catcccactt ttaaaatcag ccttagtata |
| 131821 | ctttaggcac aatatactat atacatttaa aatgacaatt tgacaagttt tgacaaatgt |
| 131881 | atatacatta taaaaatcat gataaagatt tccgccgcct caaaatgttt cctcatgcct |
| 131941 | tcttggaata aatccacaca ttccttcctt ctctacaccc caccacccat atactctacc |
| 132001 | tctagaccca agcaattgct agtctgcttt ttgtcagcgt aaattagttt gcattttcta |
| 132061 | gaatttcata ttaatggaaa tgtacagtaa gtactctttt gtgcctgact tcttacattt |
| 132121 | agtatagtgc ttttaagatt tatccaaatt gttgggtgta tcaataattt gtttcttttt |
| 132181 | attgctgagt agtattctat tgtatacgtg gttcacagtt tatccattca ccagttaatg |
| 132241 | gacattccag ttgttttata tttggggctg ttatgaataa agctgatgtg aacatttgaa |
| 132301 | tagaagtctg ttgtgaatgt ttggattgga attgcbgggt tgtacagtaa gtgtttgatt |
| 132361 | aacttcataa gaaactgcca aatgattttc caaagtggct acatataatt ttgcattttc |
| 132421 | accagcagtg tatgagattt ccagttgatc ctcatcctca ttcaaaacct ggaattaaga |
| 132481 | gtgaatcttt taaattttag ccttttgaga aaatgtgtag tggtacttca ttgtagtttt |
| 132541 | agttcgcact tctctaatga ctaatgatgt ttaacatgct tttatatctt cttttgtctc |
| 132601 | catctattct ttgttcttca ttctcttttc ttcctttaga gtaagtattt tttattttat |
| 132661 | tccattttca ctattggtat attatctata aattctttgt tgttgttcca ttttagtggg |
| 132721 | tttacaatat aaatctttaa cttatcacag tctgtcatca aataatggta taccccttac |
| 132781 | atatgtttta ggaaccttac agtggtaaaa atatcagttc cccatcctgt acttgttgct |
| 132841 | attgttttca tgcattttat tctgtatata ttataaactc tacaatctat cattattact |
| 132901 | ttttgtttaa atattaaatt ctttaaaaga gatttttaaa aataagaaaa tagtctttca |
| 132961 | tattttctca tgtatttgcc atttttattg tttttttttt cttccatatt tgagatccaa |
| 133021 | atttctatct ggtatacttt tccttctgcc tgaataacta cctttagtat ttttttgtag |
| 133081 | tacagatctg ttggcaatga ttatctgaac ttctgtatgt ctgaaaaagc ctttagctaa |
| 133141 | tttttgaaag ttttttgatg gacatatgat atggtttggc cctgtgtctc catctaaatc |
| 133201 | ttatcttgaa ttgtaatccc catgatcccc atgtgtcaag ggtgggacca ggtggaggta |
| 133261 | attggatcat gagggccgtt cgccccatgc tgttctccta ataatgagtg agtctcatga |
| 133321 | gatccgatgg ttttataagt gtctgacatt tcccctgctt gcacttctcc tttctgccac |
| 133381 | cttgtgaagc aggtgcctgt ttccccttca ccttctgcca tgattgtaag tttcatgagg |
| 133441 | tctccccagc cttgctgaac tgttagtcaa ttaaacctct ttcctttata aattacccag |
| 133501 | tctcaggtat ttcttcatag cagcatgaga atggactaac acggtacata caattacagg |
| 133561 | ttgctagtcc cttttttccc ttcagtgctt taaggatttc actcttccat agtttctgat |
| 133621 | gagtagtctg accattccta actttgtgcc attattttct catttttttc tgactctccc |
| 133681 | ttctgggact ccaattacaa atatcccaga cttcctaact ttggcaggtc aagagatcga |
| 133741 | gaccatcctg gtcaacatgg tgaaacccag tctctactaa atatacaaaa aattagccag |
| 133801 | gcatggtggt gggcgcctgt agtcccagct acttgtaagg ctgaggcagg agaatggctt |
| 133861 | gaacccggga gggggagcct gcagtgagct gagatcgcgc cactgcactc cagcccgggc |
| 133921 | gacagaccga gaatccgtat caaaaaaaaa aaatcattca aaagattact gatgcttgtt |
| 133981 | tcattttttt ttaatttttc aactggtaat taatttatta aaatagttga cttatacgtc |
| 134041 | tacaatggtg acttccatct caactcctgg ctcaatactg atggaagtaa tctgcttaac |
| 134101 | aatctcagaa ggactgagca agtcaatgag tcgcttgtgg attctcatct ggaaatgatc |
| 134161 | ccatggctta gaaccttcac cacatggagt tttttcttgt agtgattctc aaagtcttag |
| 134221 | taggcatttg aactggtctt ttcactttga gattcttttc ctttgctcct ctgatcaagt |
| 134281 | cagcacacac cttcgccagg gattttacat tgcagcttgt tagagtgatt cgaattcggt |
| 134341 | gaattgccat cttcggctcc gtgggtgttt ttccggtatc cttaaaagcc atcactgctg |
| 134401 | cgcggcttcc tgacctactt gttccggcaa gagtgaacag tggtgagtca ggagcaggtg |
| 134461 | cgggcggatc agagctccac aacacctacg accacctctt cttcaaagag gtgtttcatg |
| 134521 | ttttaaaatc ttaatttcct tctgtttcat tttggataaa atctgtcttc aagtttggtg |
| 134581 | cctttttttt tgggccaata tctaatctaa agttcatcct atccagtatg tttctcattt |
| 134641 | caaatattgt attttctatc tgcagagttt gatttgtatt tgaaaacgtt ttttaatctt |
| 134701 | tctcattgtc ttaaacattt ggagtatact tataataatt gttttactgt tgttatctgt |
| 134761 | tacttctatc atctatgaaa ttactatatc tgtttctatt gattgatttg attactattc |
| 134821 | tggttgggag gcaatatttt ccctacttct ttgcttactt ggtaattttt ttatcaatga |
| 134881 | aaatttataa aagtgaactt catttacaat tggatataat gaattttaca tttttgtgtc |
| 134941 | ctggattttt ctgtattcct ttaaatattg ttggatttct tttttttccc ccctccggga |
| 135001 | tgcagataag tttcttggaa ttagctggat gcttttgaga tttgctttta agatttgtta |
| 135061 | gggtgaattc agagcagggc tactttgatc taggaaatag ccctctgaag ggtctcatgt |
| 135121 | tctgtgagat aggaggtctt tctcctctga ctggttggta gcctaagcta ttcctgattc |
| 135181 | ttgtaaggtc tggacactgt tctgcatact cttttctgat agttctttcc ctggccttag |
| 135241 | tagttaccac acatctatgc acatagcggt attcagccaa agtttgaaag gattcaaaga |
| 135301 | tctccagagc tctctctgta tcactgtttc tgttattcta tcccacaaat tctaagtgtg |
| 135361 | tgaaactccc tgaaatcaga actatgtctc ctcaactcag tgagaccaca agccactgtt |
| 135421 | tgggtttccc ctgcccatgt tgcagcctag aaactctcct caggcaaaaa gatcaggcaa |
| 135481 | catcggggtc atctcatttc cttccctttc agagatcact gtaattgcct attgaacaat |
| 135541 | gcctgaagaa agatgtttca tatattttgt ctggctttct agttgcttaa ggtaagaagg |
| 135601 | taaatgcatt cctagttact gcattgtggc tgggagcaga attccaatac tgtttttttt |
| 135661 | ataatatgct tttacttaat tatttgagga ttccctttag ttatcataat tttacatgat |
| 135721 | gtaaacaggt aaatgagaat atcttcaaaa tatatttttc agttttgggg tggttctctc |
| 135781 | agttctggtt tttgccaaat ataatagatt tttagtatct gagttccata tgacaaaatt |
| 135841 | tataaatctt gggtgtatcc atatggtatg ttataatcgg aaaagataga tgaaattccg |
| 135901 | cttttgtcta atgtctttat aggtcttgga gaaacttgaa gaagggttgt aaagtccata |
| 135961 | actttacaat gagacaaaat taaaagaatc caagccaaaa ttgtcctaga caatgaaaag |
| 136021 | tatcgctatg cagaagccaa atctcttaag ctcctccacc atatcagtca tgacacagtc |
| 136081 | tatagtttaa caattgtttc aatttggaaa ttaattttta gtactaattt aaatatttca |
| 136141 | tattagtata tgagaattct tccttctgtt caggctgtgg tatggggaaa agtcagttcc |
| 136201 | catcaatgca gattcatatc taccagcaca gtgattaaat tatcctcata tcctcttgtg |
| 136261 | tttgaacaag ctgtgtactt ttaattttaa tggatttaac tcaatattca atatatgttg |
| 136321 | attactgaat acaacaaaaa gtgtaataga cactccttga gaagctcata atctatttgg |
| 136381 | gcagatggaa caaatactta gaaaaattga aaggtagttt aggaccacag taaaaaaaaa |
| 136441 | ttgggggtgc aggatataaa gtatcaattg aattgtagaa gcaatatata ctgtgtattt |
| 136501 | tttcacctgg gtgagagggt gagactccgt ctaaaaaaaa aaaaaaaact atggttgttc |
| 136561 | accataacta aacatttaat ctctttcagt ctatcttact catctacaaa atggagataa |
| 136621 | tacctgtttt gcagtgcagg ccctgacata cgggtagagt tccataaatc ctagcttcta |
| 136681 | ttccttaact cttttaactc ttttcttcct tccttctttc tagctaattt ttaactctct |
| 136741 | atcctagaca acttttgcta aacgtgtata acatgtagta cctacgcata ggaatatgtt |
| 136801 | ttatagaaca gaattattga aaacagcttc ttacatttct gttatttttt caaaagcaag |
| 136861 | aattcatgta ttccttctga gccaagtaca tgcaataaaa agtaagagag attcagaaat |
| 136921 | tctgatgatt attctcccaa gaagagtgct tgctagagtg agggtcttgc agacacagaa |
| 136981 | ggagctgatg gggtgaactg ctggggtgtt acaaaaggcc ttcgggaaaa tacgtaatct |
| 137041 | aagtcaataa atcatagagt gaagattccc tcagggaaaa agggagtggt tctgaagaac |
| 137101 | ttacaaattt ttccaggcaa tagccacaga tgctagcaca agggcattat ggccacatag |
| 137161 | tgtgagcaaa agtgcttaac tttttgccct tcttctaata tttactctat tagcccagac |
| 137221 | aacatgagat ccagaagcct catgatgagt ggagaggaaa tataaatcag aagaaatggt |
| 137281 | caaaaagatg cctatattca cttccgcact taggtctcca agcctcagtt cctggcatga |
| 137341 | gtaggtagag gagaggagct tggaatagga tgtgagatta cagttttaat atagactgga |
| 137401 | ctggatattt gaatacctga aaatgaatct gaattctcaa aatgaggtgg ttcctgcaac |
| 137461 | tgaaaataac aagaaagcta caggatcttc tgccatgtta tccaggggtg gaaaagtgaa |
| 137521 | attcagtgga gccaggttaa agatggagtt tgggccggga gtggtggttc atgcctataa |
| 137581 | tcccagaact ttgagaggcc aaggtgggca gattacttga ggccaggata tcaagaccag |
| 137641 | cctggccaac atggtgaaac cccatctcta ctaaaaataa aaaattagcc aggtgtggtg |
| 137701 | gcatgtgcct gtagtcccag ctactggggt gggtgaggca tgagaatcac ttgaacctgg |
| 137761 | aagggggagc ctgtggtgag tcaagattgc accactgcac tcccgcctgg gcaacagagc |
| 137821 | aagaccctgt gtgaccttgt gtccaaaaac agacaaacaa acaaatacca tgtggagttt |
| 137881 | gtttactctt taaacaaata tccttcatgt gttgaactga actataatta tagttagtag |
| 137941 | ggcacatagc aggttttaat aagatatcta gttcttcctc ttaaggtaac tcgttagaac |
| 138001 | ttttatgaga aagaactaaa gaatttctaa tggggcagct aatccactct tttgtgcact |
| 138061 | ctgttctgct gatgatctga tgttagtcgg ggtttctgtt tgagattcct gagccttaac |
| 138121 | tgctgatgac agagttcaaa atcattgctt tctaactttg agaatgactg cctaatatga |
| 138181 | catcattttc tacccctgag tgctaatagt ctaccttatt cctcctgcct gtccttctcc |
| 138241 | ttgaggagga ggatcatcaa tgcactgtgt ggattgaagt ggcttcatac ccttttgatg |
| 138301 | ttaatgttct cctttgctta aagtgtgaac tgaatatgga tccctcattt atgaagcacc |
| 138361 | atgacacttc ctgggtaatg aacaattaaa cagacttctc agcaatagtg actatttttc |
| 138421 | tgatttttca cttcatggac aatattgtat gcaagttaaa tttgcaacta gcttgaggct |
| 138481 | tcacacatgg tgagtttgag aaattgaatt ctctacctca aatgtatttc cttttccttg |
| 138541 | aactctacat tcaggtcagc tgtccagttc ttaaacaaca ggttttggag aggcaatgag |
| 138601 | taataaaata gcattttctc cttcaattct atctgcattt gaaaaaaata accttttatt |
| 138661 | tttgattcaa agaagagagg agttttcttg tctttctaca tctgttccaa ctcctccaaa |
| 138721 | tgcacaaaaa ttttttcaga gcattccaga gtttctcaga ctgcacatag aagattttgc |
| 138781 | atatagatac atcttggcca taataacctt ctactgaatt agtagaaaat agatgtattc |
| 138841 | taggttttca tatctttatg gcaatatgaa tagacaaggc tcttcttgca aaaatatctc |
| 138901 | ctgaactgtg cgggagatgc ttggaagacc cagtcaaaat tacgaagtat cccaagtttg |
| 138961 | tatcctcctg tggcttcccc gtattacaat aatgtcattc tgatccaggt tccagtactc |
| 139021 | tcaagccctt gtccttccct tttcatttta gcttgcattc atccaagtat ttggatggaa |
| 139081 | attatcaata ccttatacga gaacgtatgg gaggctgagg cgggcggatc acgaggtcag |
| 139141 | gagatcgaga ccatcctggc taacacagtt aaaccctgtc tctaccagaa aaatacaaaa |
| 139201 | aattagccat gcatggtggc acgcgcctgt agtcccagct acttgggagg ctgaggcagg |
| 139261 | agaatcgctt gaacctggga ggcagaggtt gcagtgagcc aagatcacgc caccgcactc |
| 139321 | cagcctgggt gacagagcga gactcatctc aaaaacaaac aaacaaaaag aatgtaaatg |
| 139381 | attgggagtt aaaattatgc ttttcagttt tcagccatgg atcatgtttt cttgccttgc |
| 139441 | ctgattccta gagtctcact ccatgatgtt tcctctttat tataaagatt agatggcttt |
| 139501 | gcattgctgc catgtggcat ttatacttct caagcagctg tgtcatctta ttctaccgtt |
| 139561 | taaacttagt tttactttaa gtccacatct aaactgtttg cctgcatgcc cagcactttt |
| 139621 | tccaccctct acattttatt tgactggagc aatcacctta gcctctctag gtctttgctt |
| 139681 | atcatcactc tgctcattct tcaagcctca cttgattact gcctcctctg tgttgctttc |
| 139741 | ctggatttcc tcagtaagac atagtttctc cctttcatac ttctgtggta ttaagtatgc |
| 139801 | accagttaca tgtgactcat ctccaagtgc tttggcatgg agatattatt tatgttcctt |
| 139861 | atatgactac tgaccacttt tttctagact aaatattgaa acacttggcc agataatttt |
| 139921 | gcttaatttt gagtttcctt ttatactttt taaaacaaat ttttgaaatt aaattacatt |
| 139981 | ttgttaggtt gcaaatctga aaaagtccaa ggatgaggtg agtttgttgt ggtcagttgg |
| 140041 | gtagttgcta aactcatagc tggtttgtgt ctgctgacca gcacattgtt agcctagaga |
| 140101 | aagtctacat ggggaaccag attatgatgc aagcgttgct tggagagccc ttgatcaaga |
| 140161 | gcaaaacagg ttggtagact cgagggatag ttcagctagg tctgatggaa cattccagtt |
| 140221 | ttgccaacag aaggaaaaac attggaaggg cttatcttcc ccaggatctg gatctgttcc |
| 140281 | actgggtaac atttaataag cactaacatg gtctcttctt tcacttgcca tttcctgtgc |
| 140341 | ttctttttcc aactactaca tctcctttga cacattttct ttttcttttt cttttttttt |
| 140401 | ttttgagata gagtcttgct ctgtcaccca ggctggagta cagtggtacg atcttagctc |
| 140461 | accgcaacct ccacctcccc ggtccaagcg attctcctgc ctcagcctcc tgaattgctg |
| 140521 | ggatcacaga tgtgcgccac cacactcagc aatttttttt ttttttttgt atttttagta |
| 140581 | gaggcagggt ttcaccatgt tggccaggct ggtctcgaac tcctgacctc aggtaatcca |
| 140641 | ctggcctcgg cgtcctagag tgctggcatt acaggtgtga gccactgtgc ctggcctctt |
| 140701 | tttaagtgta tcaataccat cattttggct gcttattctg ccctgggagc cattctgtct |
| 140761 | ctttaggaag tttttgcgtg tatcagatct catcttttat attttgatgt ttaatagcat |
| 140821 | ttaaaggatt ttgttttgtg ttttttaaat gatttgaaaa caagtgtgct cactaattaa |
| 140881 | taaacagcag attcaaactt ttgttgcttt ttcaagaaaa aaatgaaaaa ttctgtaaca |
| 140941 | atatatctta gccataaaac acttgtaatc agcactcctc cagaaatttc aggatgtaag |
| 141001 | ttatcttaat gattatacta gaaaatcttg gaaagcaggg atatggctaa ctttttataa |
| 141061 | catgtatccc tactgtcaca acaagagtta agacttaata aatacagtca tgtgttgctt |
| 141121 | aacaactggg atatattctt gtaaccaccc aaggggttca ttttgcctgc tacctggata |
| 141181 | cagccaattt atcaagaacc aggaattgca gtagagaaag ggtttaattc atacagagcc |
| 141241 | agctgaatgg gacactagag ttctattact gaagtcagtc tccctgaaaa ttcagagggt |
| 141301 | agggtttttc aaggatagtt tgaagggcca gggaatggtg ctgctgattg gttggagata |
| 141361 | caatcatagg gatgtggaaa atggtcctca tgcatttctc aagtccactc cttttcttag |
| 141421 | ttcctgctta gcggaggtgt tagaatttgc ttcttggtgg ggccacagga ctggttggtg |
| 141481 | ggtccaggtg gggccaccag ttgtcagaaa tgcaaaaacc tgaaaagaca tctcaaaaga |
| 141541 | ccaatcttag gttctgtaat agtgatgtta tttgcaggag taattgggga agttgcaaat |
| 141601 | cttgtggcta atttgttagt cctacaaagg cagcctagtc cccaggaaag aagggggttt |
| 141661 | atttaaggaa agggcbgtta tcatctttgt ttcaaagtta aactataaac taagttcctc |
| 141721 | ccaaagttag ttggacctgt ccccaggaat ggacaagggc agcttggagg ttagaaacaa |
| 141781 | gatggaatct gttagtttag atctctttca ctgtcataat tttgtcactg ttaacgtttg |
| 141841 | caaaggtggt ttcactgtag actttataaa caccatatac ttagactata ctaagtttat |
| 141901 | taaaaatatt tttctttctt tagtaacaaa ttaaccttag cttactataa gttttttact |
| 141961 | ttttgaagtt tttaattttt ttgaactttt gactcttgta ataacagcat aaaacacact |
| 142021 | ttgtacaact gtacaaacat attttcttta tatacttatt ctataagtgc tttctatttt |
| 142081 | cattttttcc ctttaaactt tttaatttaa atgaagacag aaacacaata ccctaggtct |
| 142141 | acacaggttc tggatcatca atatcattat ccaccacctc cacatcttgt cccactggaa |
| 142201 | gatcttcatg gacaataaca cgaagctctc gtctcctgtg ttaacaatgc cttcttctgg |
| 142261 | aatacctcct gaaagacctg cctgaggctg ttttatagtt aatttccttt tttacaagta |
| 142321 | gaaggagtac actctaaaat aacgattaag agtattgtac agtaaataaa tacagcagta |
| 142381 | acagagtcgg ttattatcat tatcaagtat tatgtactat acctaattgt gctacatttt |
| 142441 | tgtatgcctg gcagtgcagt aggtgtgttt caccaggatc accacaaaca tatgagtaat |
| 142501 | gtgttgatct atgacattac cagagctacc atgttgatat aaacaggaga cagggaaata |
| 142561 | ctgggtagaa gagggcagtt ccctggcaaa agccttactc ccaagcctgg aaacctgcag |
| 142621 | tcctaaatgg gaataggcat tcctgtttgt gcatccaaat gttgcctttt ggcctgccat |
| 142681 | gcccctctgt cctgtatcca tataaacccc aaatcccagg cttgatgagc agatgagcag |
| 142741 | acaaacagaa gagcagagga gcagaagagt ggtgctgcag agaaagagag aagagaagga |
| 142801 | gcatctgaat gtcaagagga gtttggatgg ggatggtcag agaggagatc agctgcagga |
| 142861 | cagccaaact ccaggggaag atcatctctc actccatccc ctttccagct ccccacccat |
| 142921 | cctgctgaga gccacctcca tcacccagta aaatcctcac attcaccatc cttcaagttc |
| 142981 | atgtgtgact tgattcttcc tggacactgg acaagaacct gggtaccaag agggcactga |
| 143041 | gctggttaac acttaagcca tctgcggatg gcggagctaa aagagcactg tagcacaccc |
| 143101 | actggggctt tgagagtcac aggcacacac ccctagatgc caccgtggga tgggaaccca |
| 143161 | aaagtgctcg ccctggctcc tgcacctatc tgtctacatg ctccctctcc tataacaggc |
| 143221 | ttgcacagca gtgactgcgc aacagatgag ccacacccct tccacatgtc tgcaaggggt |
| 143281 | atcagggaac tctccccttt caatgtcagt aggtaatagg aattttttag ctcctttata |
| 143341 | atcttatgat accacctttg tgtatgtggt ctgtcattga ctgaagtgtc gttatgtggt |
| 143401 | acgtgactgt atttattgag tggatggtca attgtatgag gtacttgaat aatgagtggt |
| 143461 | gtgaaccttg gttttatgac atcttctgag agctgctttc aggtgggtat aagaagagat |
| 143521 | atttctagtc taggtcccca ctccttttct tagttcctgc ttagtggagg tgttagaaaa |
| 143581 | aaaggttgga ctctggcact attttcctcc attggttata tggactcaaa gccataactt |
| 143641 | aaggaagaat gtctattttt agatttggtg actgatttag ataggttgct acagaaagtg |
| 143701 | gtacaaagat atttcacaca tagaatatca aatccagggt gctttagcac tgcattccaa |
| 143761 | tggcctggga tggatgggtg gaagccctgg caagctgaaa taaaccaggg caagctcctc |
| 143821 | tttggaattc acaagtctga caactggtga ctcaggctct agtcaggaga cctgaatgtt |
| 143881 | acgtctggca tcacgatacc ttagtttaca gagattaatc taacaggcct tcagttagtt |
| 143941 | tgctttattt taaaattctg cttagctttt tgttgcctac taaatttctc ctgatgtata |
| 144001 | tttagatgta ggtgaaggct gtagatgtat gcactaccaa caccagcttc tgggagggaa |
| 144061 | cattttccca ctcacaagca agtgaacttt gctttctcca tgaagaagaa tgacctgcat |
| 144121 | gatggctttc agaagtggag aacatggctc acagttccct ccacagttcc tccatggcct |
| 144181 | ttggttgcat cttctctgaa tggaggagct tgggttatgt gaaaagcaga gctaccagac |
| 144241 | tacataaatg ttttagtgag aaggcagcaa attaaaatat cagaaatttt gaaaggaaag |
| 144301 | gtttataata gttagattta aaacatactt tgaggccagg cagcgtggct tacgccagta |
| 144361 | atcccagcac tttgggaggc caaggcggga ggattgcttg agggcaggtg ttcgagacta |
| 144421 | gcctgcacta cataacaaga ccttgtcctg tctctattaa aaaaaaaaaa aggaaggaaa |
| 144481 | gggaagaaaa agtgctttaa tattcagagg catgagagat gcaatgagta atataggacc |
| 144541 | ttctctaagg acactggggg agcactctac agaggtggtt ctaatctagc ctggcaaatc |
| 144601 | tctgttccct tcatgccttg tacttccttc ttctttgtga ctttgctaat gttattcctt |
| 144661 | cctcttggac aaatttccta tactaaccaa aaggccccaa gacacagggg gaaatgtggt |
| 144721 | aaatctgaga ctggaaggaa attaccatct aatgtcactc ttgtacagta taactattgt |
| 144781 | taatattatt gcbggggtca ctcatttatt catatcacaa acactgactg agtgcctatt |
| 144841 | atttgccaag catgggcaat aaagagttga agaccaacaa agcccctgcc ttcccagaag |
| 144901 | cttatttgct tgtggggaaa ataaacagtg gatcaattaa caaataagta gataacataa |
| 144961 | tgtcacggcc aggcgtggtg gcctcatgct ggtaatccca gcactttgga agactgaggt |
| 145021 | gggaggatca cttaggccca ggagtttgag accagcctgg gcagcatagg gaaatcccat |
| 145081 | ctctaccaaa acaaaacaaa acaaaacaaa acaaaacaaa acaaacaata aacgaaacac |
| 145141 | atggtggcgt gtgcctgtag tcccagctac tcaggaggct gaggtgggag gatcacttga |
| 145201 | gcccaggaca cagaggttgc agtgagccaa catctcccca ctgcactcca gcccgggtga |
| 145261 | cagggtgaga ccctgtctca aaacaaacaa acaaacaaaa caaccaaaaa ccaaaaaaag |
| 145321 | taatgtcaga tggtgactgt tttgaggaaa ataaagcagg gtaggggaac tagtgataac |
| 145381 | tggtagattt gggtttctcc atctctggct gcttttgcat cctcagtaag gtgagagtgg |
| 145441 | caaaggaaat tccaggttga ctttcgggtt cagtgaattt tctaccccgt gtctcttcac |
| 145501 | tgccctttcc ctccccagaa cctctaaaat ctgatcctta gattctgcaa tgtaagtcag |
| 145561 | cttccttctt cctggttgcc agctcactac attcttattc ctggataaac caaaaatctc |
| 145621 | ttccttgttt tcatattttc aaaaagatgt agaaatctct cacctgctca tgttccttcc |
| 145681 | tttttgtctt gttggtatat atacctttta caattctttc actaccaaat gtagttggat |
| 145741 | attgggatgt agtcacaaca aacacataaa tacaattcac catttttaaa tggacttatt |
| 145801 | catttagtct gcttaaaatt gagataataa cacacgcacc agttgggttt ctctgagaac |
| 145861 | tctgggcatt tttaatcctg gcaattttta aattgcttag cagtaaaaca gtcagacaac |
| 145921 | agcacctatt gttataaatc cctgcctctt cttacctcaa tgaggctatc ctttctctct |
| 145981 | atcaattctg tcagcagaat taagaagagc cattgatttc cagtttgttc agcgtttttc |
| 146041 | ttcttaggat gggagtgatg acttctaacc tctttacatc tagagactca atttaagtct |
| 146101 | acttctttca ttcagccttc tctcttcatt ttcagctgcc tggaatgtct tctttctctc |
| 146161 | agttcctatc tttgacatta aaaatcacag tacttagtta tattctacct cacaccaatc |
| 146221 | attttacttg ttaatatctt ttttcctagt tagattgtga cattttggaa taaaagaaaa |
| 146281 | atatcctttt ttactttata gctctccaga tttcattaga ttagtataga ttcgagtgcc |
| 146341 | ttttatatat caggcaatgc ctagtgtata atatttttac ttatgggttt tagcatttaa |
| 146401 | cttatttaat gatcacaaca ttcctatgat gttatttgtt ttcataattt gttgaaatga |
| 146461 | aagctgatgg tcagaaaggt taaaaagttg tctggtcata atttttgagg aggcagagct |
| 146521 | aggttttgaa cgcaggtctg tctgattctg agaataatcc tgtgctcctt cagctgaacc |
| 146581 | acacagcccc tcttagtgct ttgtctccat agacactaag tgtattcttg ttgattgagt |
| 146641 | gaattaacga gtgaattatc tggagctctt tctgcttctg ttttcttctc tgtacaatga |
| 146701 | ggatcatcac atgaacctga tctaagaata gaatagtcca actgagttcc cttaatttgg |
| 146761 | taaccaagag agagtagagt taattaacta gaaccctttg ccatcacttc tctctaaact |
| 146821 | tttcatcatt ttcctctaaa agtccggtcc tgagctctat tacaagatag aacattttag |
| 146881 | cctctatcga agagagcact attaatattt tatggcattg gctccttttt tcctaatact |
| 146941 | gtgggattaa aataatgttt actaaattct ggatgttcga ttcctgtttt ttcatgatat |
| 147001 | tttataatcc aggccttctt catagagaca cagggctatg ttttataact gccagggtca |
| 147061 | agcaaagaac agcttgtgtg agatacttaa agaaatagct aagcagtaac ttcagacctt |
| 147121 | ctgtatattt tcctcaaaat tttctctcag tttttgtctc cctacaactc atttttagaa |
| 147181 | aacaaaaaca taacacaatt ttgccctttt aaaagataat acagcbgggt gcagtggctc |
| 147241 | acgcttgtaa tcccagcact ttgggaggct gaggtggggc agatcacctg aggtcaggag |
| 147301 | ttcaagacca gcctggccaa tatggtgaaa ccctgtctct actaaaaata caaaaattag |
| 147361 | ctgggtgagg tggcggcagg cgcctgtaat cccagatacc cgggaagctg aggcaggagg |
| 147421 | atcgcttgaa cctgggaggc ggaggtagca gtgagctgga attgcaccac tgcactccag |
| 147481 | cctgggcgaa agagtaagac tctatctaaa gaaaaaaaaa tgtactataa taatttacaa |
| 147541 | agtacagaaa atatctaaag gaaaagaaat aacatctcac aacctcatca tctagatatg |
| 147601 | actgcaaaaa ttttggcata tttcatttca gcttttaatt aatttatttt tgcagaagac |
| 147661 | atttatttca gatattctaa ctttataatc tgtagaattt taatgatatt tttgtatgac |
| 147721 | atctatcata aacatttctg catgtcattg aaatatttat aaatgttatt tttatttaaa |
| 147781 | caatgcataa ttgatataac ccttctctta aaattggtga tttcacatac ctggggatga |
| 147841 | gccgatgtga aacaaaagag aaagggtaag agatagctag tctcttgact catttttttt |
| 147901 | tttccatatg acttgaaaaa aagaacttat cttagagacc tctagaatag ttagcacaaa |
| 147961 | tagatttctc aatgtggtta agatgaaata cagatactga atttactctt ttatgtgaaa |
| 148021 | taaataaaaa ctggataaga tatatatagc aacagttttc aagacattat acctcagaca |
| 148081 | acaaaggata atgacctctg agagagggaa aacaaattag gtgagcctgt gattgcccca |
| 148141 | gtttactgcc tggagagaga ttccaggcca gggtgcagag agaagggttg cgaatggaaa |
| 148201 | ctattgctct ttctgagtta aggagagaga cctgaaagtc tgcaggtaca aagatagctg |
| 148261 | caattcatga gaaagagttc cagagaaaag aaaactgaac agagagtgag ctctggattt |
| 148321 | ctgtagtgtt cctgctgact cttctgctga atcatgatca gtgcatgtgt gtggctggag |
| 148381 | aaagaacctc tgaaaaggtt tagagggaca aatccttaga atcacatagg cctgggaata |
| 148441 | gctcctcttt ccaccagaaa gagtataaaa accatgaaat tcatgggaca ttaggtagag |
| 148501 | tacttagaag ggttttgctt cagcagtgag aaaaaattag tcctagacca aatgttgctc |
| 148561 | tgatcctaac aaaacttaaa aaatgagacc ctaaaggata aaactgtttc caggtaactt |
| 148621 | aaatatatac cagaacaaag ccgaagacta taggaatatg aaaatatcta gcagtcagta |
| 148681 | aggtaaaatt cataatgtct aatatgcaac caaatattac catgaatata aagaagcatg |
| 148741 | aaaataaata cccataattc caagaaaaat caattataca taattgcccc atcaatgaca |
| 148801 | cagatgatgt aattagtaaa caaagagcta attataactg ccaactctag ccattacaca |
| 148861 | tgttcaagtg gctagaggaa agatcaaatc acgacacaga agaaataaaa agacaataaa |
| 148921 | atatgtacag atgaaaatta caatatctga gatgaagcat aagcgagatg ggattcgcag |
| 148981 | cagattagat atagaagaag gattaatgaa catcaaaaca tgtatgacaa cagtagtata |
| 149041 | aagtctgtaa gaaaagaaat ggaaacatac tggtataagg ttttacacta tgtatgaaat |
| 149101 | ggtgtagtat cacttgaaga gagactgtga ctaaagacca ctgtaacctc ttagggaaag |
| 149161 | aaaaatatct ttttctaccc atcctgggtt cacagctgag gccactataa caaaaaacag |
| 149221 | attaataaca cagaagcata cacatttact taatataagt gttatgtgac acagtagcca |
| 149281 | tcataaggaa agaagactca aagaaacaga tctgagtatt tttatagtag gtttgatgaa |
| 149341 | gaatggatag tcatggagaa atataatggg gcatataata caatggggtt atgatctaat |
| 149401 | ggtagtaaac tgggggaaat ttagcbgggt ttgcttgttc agatttttct ccttgacctt |
| 149461 | ttgtcgtgag agacaaggat gtttcttttc tctgggtata gggagggcac ctctcacatg |
| 149521 | agggacttat gatctgcttc agagaagtgc cagggaagaa cagagtgacc gtcctgcttc |
| 149581 | tgcagttttc tcaaattcat acagcttaaa atatttaaca tgctaaggtg ttacattttg |
| 149641 | gggtagtata tcttgatacc catcacctga aaccaaccac tttataatag taacacaaag |
| 149701 | agttgtacat aatataccat aaaggtggta aaatggaatc attggaaaag tcaattcatc |
| 149761 | caaaagaagg ctgaaagagg aaagcaaaaa caaagaagag atgggagaaa taaaaattaa |
| 149821 | atggtaggga catgagcatc cattaatttt ggtatacagg aggggcttga ggggtgtcct |
| 149881 | ggaatcaatc cccctcagat accaaaggat gactgtatat tttttaaatt aagagacttt |
| 149941 | cattctttaa atattcttga cttacagttt tttaaaaaga aaaaaaatca aagcatagta |
| 150001 | tagttgttaa atcattttaa tagtatattc agtggctgaa atgacaggga gtatcaatca |
| 150061 | ttatttattc aatataaagt tatccttact gaaaaaataa gatataactg ggaaatatgc |
| 150121 | ttggatccct cacacatcca cttaatttct taaaggaaga aagatgaaac acatgtaaga |
| 150181 | acagaaacaa ataaaccatt tactgtaaca ttccaggaat tgtgggatcc ttttcttccc |
| 150241 | aagtttattt atttgcttat ctttatctcc tagtggtagt ttgtttcctt tggtagaata |
| 150301 | tatggcagtc ccacattggt gacacctggt gctcccttca tccaactgga tcactttgag |
| 150361 | attcagtttt acaccttttt agcattttct ttgtgttcat atatcagtta tgatgagcca |
| 150421 | ctgataatat tttgttctaa aacgaaacat attacttagt acttttttta ttgtctcgct |
| 150481 | gacttttaaa atttgagtga tgtacagact ttgttttttt aatgaaatat aaatattttc |
| 150541 | tcatggtttc taaattcctt ataaaattaa attaattcaa tctgcaaaaa tattaaatgg |
| 150601 | taagagaata aactcatcac ttagatgttc atattaaatg taaatggcct aaatacccca |
| 150661 | attaaaagtt aaaaatggtc taattgaata aaatacccat atccaactat atcttgccta |
| 150721 | taagaaaata ttgccacttg cagtataaaa atacaaatag gtaaaagata aaaggatgga |
| 150781 | aaaagacata ctattttaaa ctaataaaat attaattaat taattagtca gatttcagga |
| 150841 | cctttttctg aataattgat agaataaaca gacaaaaata tcagtaagga tacagaaaac |
| 150901 | ctccaaaata ttatcaatca ccttgaatta attaatattt atggggccag gcttggggct |
| 150961 | catgcctgta attccagcac tttggcaggc cttgagctca ggaattcgag acaagcctgg |
| 151021 | gcaacacaca cacacacaca cacacacaca cacacacaca cacgtgtata tatatatgca |
| 151081 | cacacacaca tcagctaaaa gcagcagaat acacattttc ttcaagagaa cacagaatat |
| 151141 | ttagcatgat atgctatatt ctaggccata aataaatctc aacagactta aaataattca |
| 151201 | gctaatacaa agtatattct gtaactacag tggaattaag tttgaaatta atagcaaaag |
| 151261 | atatctggca aatccccaaa tatttggtaa ctaatatcat acttctaaat gacccagggt |
| 151321 | caaataagaa atcaaaatag aaatttgaaa gtgtttgaac taaattaaac acacatttca |
| 151381 | aaacttttga gatgcaacaa cagcagtatt tagaggaaaa tttataatag tatagaccta |
| 151441 | tattagaaaa gaagatctca agccagtgat ctcagtttct acctgaagaa actagaaaaa |
| 151501 | caaaacaaat aaatccaaaa taagcagaag aaagtaagta ttaaagacca gagctgaaat |
| 151561 | caataaagta gaaaacagaa aaacaaaaca aaacaaaatt taataacacc caaaacttgt |
| 151621 | tattatacag atcagtaaga ttgataaacc actggtcaag actgattagg aatttatcaa |
| 151681 | gaagaaacga tttccttttt ttcatactgt atatgtagca cccaaaaata aataacttta |
| 151741 | gtataacatt tattcatcta atacagaaga cagaaatgag aaaagtggca tcattacaaa |
| 151801 | ttctacagat agtaaaagaa caataagata atatgataaa aaactcaggc caataaattt |
| 151861 | gacaacttag ataaattgca caaattactt atatgacaca atctaccaaa gttcattcag |
| 151921 | gaagaaattg ataatcttag tagctgtata tctattaaag aaattaagtt gatagttaaa |
| 151981 | aattatccta caaaacgtat tccaagctct gactgtttcc ctagagaatt gtacccaata |
| 152041 | tttaaggaga aagtaattct aattctgcgt aaacttttct aggaaattga agaggaggaa |
| 152101 | atatttccca actctccctg aggccagtgc tactctatcc aaaaccagaa aaagacattc |
| 152161 | caagaaaaca aaactacaga ccactgtatg caagaagcaa tcggaaatta aaaattgtaa |
| 152221 | aatatcattt aaaatatcag aaaaagtaat tatgaagtac ttaggaacaa acctgacaaa |
| 152281 | agtggctcaa gatttgaaca ctgaaaacta taaaacattg ctgtaagaaa ttaaagaggg |
| 152341 | cagaaataaa tggaaacctc atttgtgaat tagataaatt taacactgtg aagatattaa |
| 152401 | ttttccttaa attggtctat aattcaacag aatctcaatc aatacctcaa taggctttta |
| 152461 | aaaatgcttg caaaatttga caagctaatc ctaaaattta tatgaaaatg caaaggacct |
| 152521 | acaagaggca aactatcttt gaaaaagaag agtaagtttg gaagacatat acttgccctc |
| 152581 | agagctcatt ataaagctac agtaatcaag acagtgtgag actgaaataa agatagacaa |
| 152641 | agaaagacaa tttctaggtc atgagagtta tgtttcctaa aggaaggcag cagatgctta |
| 152701 | ttaactttcc ccgtgccctc aggatgcctt aaacagtggt tgccaaccac tagcagcttt |
| 152761 | agcaccactt ggaagctttt tagaaaagct aattactggg cccatcccag acctactgaa |
| 152821 | ccagaatctc tgtgggcaaa gcccaggaat ctgtgttttc acaagctctc caggtgataa |
| 152881 | tgatgtccat taaagtttga gatccattgc cttggccttt ccctgctaga aatcctccag |
| 152941 | gatttgggag acaggggaag aggtctggag agagtggcag aattcaacac cacagaatga |
| 153001 | agaggaaaat tgatggtctt tgtccatgga atccattaaa atatactctc attgctgcca |
| 153061 | ggctgagctg atgaataaaa aataagctaa tctcaaatca agccatcagg ctattgatga |
| 153121 | taattgtgtt ttagggtgag caaacagctt taccaagctc acacagttga gacaatttgt |
| 153181 | tgtttggaac tatcttactg taagatcctt aagaagaatg cagaagtatg aaaataaatc |
| 153241 | caggactcag aaatctttca actaaatctt taaaattctc tctctcatgc acacacacac |
| 153301 | atatgcacac atacacatat agtaagattt catgacacat gagacaggat gtgaagctga |
| 153361 | acagttcgat gaatgcctga gtggtaagat caccttgaag aaccagaagt gagggtctat |
| 153421 | tctagcbggg tatgagctac aaactcattt cttggggaac acatgaacac atcggggagg |
| 153481 | ctaagtagct tctgaggcta ctaatagaat ttcagtcatt tctcctgtca tctgaaaaat |
| 153541 | atatgatatt gaatttctaa aaatgggttt agtgtagtct agtcttactg tctaaaacta |
| 153601 | agatgtggct tattccaata accaaagtga ttccatccca tgtgagggaa aaaaaggata |
| 153661 | atggtgaatt aaaagcacct gcgtgtattt gttgctcctt tagaggagtc tctcttcatc |
| 153721 | aacgttaact ttctttccta cttttgatct ggctgctaaa agtctaggtt tagatctcaa |
| 153781 | accattgtcc ttctctgcat gatgtaatag ttacaattac agtctcaacc ctctggcatt |
| 153841 | taatgaagat gaaattgatt tctttagact gaaaacaaaa aaatcactta caatcaggat |
| 153901 | actgaatatg gtagcaagta caaggtccca gcttctagta gacttggcag actgtcaagc |
| 153961 | tcttactaag tgaccccacc ccatgccttt ttgtcttttc tgttgccaca caattacaat |
| 154021 | aatttgttct ctgaatgcca gagtactgac aaggaaagga attctgaagc tggctgagag |
| 154081 | aagtcgtgta aatctcccaa tctaggctcc attgactctt gtctctttct ttgtatggaa |
| 154141 | ctgattttat aatttctgtg gcaatgaaag actagtaccc aaaatgactg ctggtccttt |
| 154201 | gtttattgat caatctgagc atggactaga attcatcctc caattggtaa caagaaaaaa |
| 154261 | ttggatgggg aagcatacca ttggctaagg cagcacagca agtttgaatt tggctgcctc |
| 154321 | ttctttcaat attggttgac atcatcaaga gcagacattg gcgttggagt taagagtatc |
| 154381 | aagagagtta ataaatacca atttagggta atattttatg cctagtcttt atcttttggt |
| 154441 | gaagtggttt ctaatatcat ctcagactaa atcttatggg atatttctac ttgtagatgc |
| 154501 | taaggtatta agaaaaagct caaagtagtt gtgttttcct tatcttccta aaagtttaga |
| 154561 | ttaaagatgc caaaaatttg tgtgttggta tgtgtcaaag catttgaatg cccttgtaga |
| 154621 | ctattaaaac ctttgttctg taccaggcac tgtattgagt atattgcatg tatttattat |
| 154681 | tatatttagt tctcacagca accgtacaca ataattacaa ttccttcctt tcactaaggc |
| 154741 | atagggagtt taaataaatt agccacagta caggatggca taaaactgta gcagagccaa |
| 154801 | aactcaaaca tgtctctgtc tgactcaaaa acataggctc attctcctag agccaggcaa |
| 154861 | caacctgaaa gctcttgagt tgacttttct agttctgtgg atgaatgcaa tcatctcagg |
| 154921 | acccagataa acagaagtcc ttctttctta ttcgtatttc tcagtactag gccagtcagg |
| 154981 | acaaactctg ttctccatgg ccgtgatctt gaagaaattg agatttcatc caaaggaaat |
| 155041 | caggtattga aacgtgtgtt tatgtgtatt gattaatctt ctgcctgttt ctggaaacat |
| 155101 | ttgaagaaat ataacaaaaa gcaaatatcc tgaaactgcc taatgaacct gatctctctc |
| 155161 | tctgtctttc cctttctctc tcataggtct tttgcctgta tttctctggt ggaatttact |
| 155221 | aaataattat atcaggtgtc ttcttattgt acttgactgc tttcatcaag gtaatcttga |
| 155281 | ggacagagac ttcctttgtt agccagggca ctctagggga acagaaatta cacacacaca |
| 155341 | cacacacaca cacacacaca cacaggaact ggttcatgga ggctaaaaag tctcaaaatc |
| 155401 | tgcaggccaa aggcttgaga acccggagtc ctcattgtgt aagttccact cagagtctga |
| 155461 | agaggggaga agacagatgt cccagctcag agacctttag gcagagagag aaaattctgt |
| 155521 | cttgctcagc ctttggttct tttcaggcct ccagtggatt agatgaggct cacccacata |
| 155581 | ggggaaggag tctgatttcc tcagtctacc aatgcaaagg ttaatctcat tcagcaacat |
| 155641 | cctcacagac acacccagaa taatctttca ccaaatatct aggcactttg gcccagccaa |
| 155701 | atagacacat aaaattcact tccacacttt cttactaatc cgtgcattct ctccaataca |
| 155761 | gggcacccgg cctggcaagg agtaagtgct ccatatatat ttactaaatg acaagagatg |
| 155821 | agattatcct tagactatga ctcagatata gacaatcaat tattaatacc ctatcatttt |
| 155881 | tccccactct gacaacccaa actgaaaaat gttgggattg ccttttttga caatatgatt |
| 155941 | ttctctgaat gcagactcat gttttgacct tccctgtctg ttcctgttta gtattcatgc |
| 156001 | tggcttaact cattgattga tcaagtaacc attgagcatc tgccgtgtta acactctgaa |
| 156061 | caagatcctg taatatgaat ggtgtttagc ctgatgaata aagtgtggtg tctgtgcatt |
| 156121 | catttttata tatttattgt ttttaaccaa actttaccca tgtaaagaat aacattgatg |
| 156181 | gcaggaactt gaatttggat ctacgtacat gttccatttc agactcacca tgaaatgagg |
| 156241 | tgcttgcatt tttcattgct gattttacaa tacactttca caccttttgg gtaaaatttt |
| 156301 | gcaatcaatg taactgaggc agcatggtat gaaagcaacc ctggaggtgg aaatagaaga |
| 156361 | ctagaattta aatcttggtt atgccactta ttggttgtat gatttttgtc aagtcatttg |
| 156421 | acccgtgtct attcagagtt tctttgctag aatgaaggag ttaactagaa tttattgatc |
| 156481 | tcagtagtca gtctcctcag gcacagataa atcttggata tgtatcctga gatagctttc |
| 156541 | ccatttccac attgaagaca acattctatt ttagagcaaa aatgaattat attatttaag |
| 156601 | aatatgagtt tcagaattca gactcatgct tacgggtttg aattctagtt ctgccacttt |
| 156661 | cttactatgc agactttagc aagtcagtta atgtttgtga gcctcaggtt tctcaccagt |
| 156721 | aaagcagtgt gagtaataac tatcatatta tattattaca agcataaaat gaaataagag |
| 156781 | tacttggcac aaagaaggat cttaattttt agctttttaa aaaagctgta tttgtttata |
| 156841 | tgcagtatgt atatatatat tctcaattct attattatag actatattta ttatgttttt |
| 156901 | cataaagtca ttagtttcac tcaggaatta gttgaccctt gtgagataca tggtttgacc |
| 156961 | acttttcact ttgatgttct tcagaaaata agacaattag aaatctctga ttgtaatctt |
| 157021 | catgtaaaat attttacagt catggctaaa atgatcccag gagtggaatc atacacataa |
| 157081 | attcttttct ttattctaat aatgttacct ttagtgtcta tgccaagcaa gtatgttatg |
| 157141 | tgttgagata aaaattctta gtatgtttgt atgtgacatt cccaactccc atcccactga |
| 157201 | agtctatatt tacctagttt ctttcttttg ttttcctcta acattcatgc tattttaatc |
| 157261 | aatgttcttt cattttgaag cccccaataa gtttgacccc aaagactttc agtttgcccc |
| 157321 | tgctattcat aagcatactt atgacaatgc atgtctccca ttcttttctc atatttacac |
| 157381 | cgatcttttt attgggacaa atgggtttgt tttttcatgc ttgtgtttaa tatctcactg |
| 157441 | agttcagcat aagttattaa acataatttt ctgttttctc tttctccctc aagactttct |
| 157501 | ttttctctag acctttattt cctaactcca gagtatttgc ccaggtctat aggcccctct |
| 157561 | ctcttttgct ttcttaccaa cccatccacc ttcttctgtt tcctattgcc caactggctt |
| 157621 | cacttaaaca agagcatttg ttatttgtac agagtgcaac atataattgt cctactctgt |
| 157681 | ttggttgcta taacaaaata tcatagacta ggcagcttat aaacaacaga tatttatttc |
| 157741 | tcatagttct ggaggctgga aaatccaata tccaggcact actggcagat ttggtgtctg |
| 157801 | gtgagagcct acactctggt tcatagacag ccatccattt gcbgtgtctc catatggtag |
| 157861 | aaagaatgaa taaagtttct ggagtcttct ttacaatggc actaatccat tcatgaaggt |
| 157921 | ttcatcccat gacctaacaa taccattgta ttgggggtta tcttgcaaca tatgaatttt |
| 157981 | ggggaacata agctttcaat ctatagtaat gaagtaggaa attttccctg atcctttcat |
| 158041 | gggcaggaac tggagtatgc ctatttcaca gaggtcttat cagataaaaa aattctccat |
| 158101 | taaatggcaa aacaagtaac catttgggat tcctgggtgt acagtgccta ctattccaaa |
| 158161 | atgagattat tgaggctaac atgacccttt gtatacaaag acgggggcag aaataatatt |
| 158221 | tctagcaaat ccacacatct caatcacatt taatttcaca aaatttactt ctaataagca |
| 158281 | ttgttccaac taacaaacca tctggtgcta gtctaagata gagatggctg aagtgctcct |
| 158341 | gattccagta ttttaggtgt taaatctcca ttctaacatt gtcaatcctt aactggagta |
| 158401 | ctcaaatatt aactaacttc ctctaggata taaattaata tgtataccac attctatgtg |
| 158461 | aattatttta attatattac atgccatata caaattatat ataggtttag tcttcctgaa |
| 158521 | tattgcaagt tgagtctgtg agagaaaaaa ttaggatgaa ttgagaataa ctagaattca |
| 158581 | gaattctttt tcattaagtg ttgactgtgt taactcatat tcccggttag gtagcaagtc |
| 158641 | ctatgaagtg tgattttctc ctaacagcta aaaagcagaa aaaaaatgga tttattctag |
| 158701 | ttaatgactt gctttttcta tttttataga aaaaatgaag taaattattt cacttttctt |
| 158761 | gatgctatta ctattttgtc aggaagatag atcttctaaa ttttaggaaa ctatgaatct |
| 158821 | aagttctata ttgctctcat ttcctttttc tctttgtctc tcttctgttg tagcccctcc |
| 158881 | ctcaccgcta agccttcacc ctgactctac cctgccccca ctgccttttg ttctttggaa |
| 158941 | gacactcatt aacatttgct aatgtatgct aatgagcaat aattagcatc tctaatgtga |
| 159001 | acaaaagcag tgctacaaag gaagggtaaa gatgtgtaca gagttcagcc agccttttat |
| 159061 | gcttctttat gccttaggaa caatcctctt ctttcagttc tttcacaatt ctttagtgtt |
| 159121 | ttttgtttgt ttcattttgt ttgcttatcc atgaaccctg aaaaccattc ttcttcttga |
| 159181 | gttagaatat tgcaaaaatg ctacggagga cagaaagatt cctttttgtc ctaaataacc |
| 159241 | caaggatata agcacagctg ctaagaggtt ataatgcaca tttgtatttt catctggttg |
| 159301 | ttattttggt atcctattac tagaaaaggt tttaaccaga aaacctcaca caagataatg |
| 159361 | tatttcattt taccacactt atttacagtg gttgcccttt atggtggtaa ttgcaatgtg |
| 159421 | aaagcataca ctctgaatat atattatgac agcatggtta aataagaaat gttccctccc |
| 159481 | tcaaacaatc taaatgcaaa gaaaatgcaa gactcaccac ttactttttc ataaccacag |
| 159541 | agggctctaa atgtctttgt aaatagctat ttatttattg aatatgtata gttttttttt |
| 159601 | tgaaaaagcc agccctccaa accacataga gtaagagctg tttttgttct ttctgtagac |
| 159661 | tgatggtgtc gtgaaatacc taattgcagt ttctcacaaa tactccagca tgtaatttgc |
| 159721 | catttgcaga accaggcttc acatttcata tttgctcttc cagctcaggg gtggtagaat |
| 159781 | ttggaaacat accagcaacc cacttcactc agcctgtgtt taattataat ttcacgtaca |
| 159841 | ataaaagcag aaggaaaacg tgcaaaaaaa ttggtgtgca tccctttccc ctccttctta |
| 159901 | cgtatataaa aaagatttat ttccattgta aaaggataga atggggatct ttattttgag |
| 159961 | tagattttct atttttgttc tttctgtttg cctcagagtt agtgtcctct ctctgtgacc |
| 160021 | tcagagtaaa atgtgtttct ccataggctt catcctgttc tatttatcaa ctatattata |
| 160081 | tttatcaatt attttatatt gtgtttttaa taaagcagac atcagcagct atttattttc |
| 160141 | tacttctgag ggcctaaaga gtctcagaaa atgagtgtaa tctagaaggg aaaacattga |
| 160201 | agagtgacag ctattataac agttgtgatt tttgcctgcc tccctctttt ggattggtga |
| 160261 | gtcctaccaa aaaccaaaac tattattctc cttgtaattt tgaaaccaca gagattgaaa |
| 160321 | ataactattt agtatctcca agatattata atgtttgaaa atatgaccag ttttgggggc |
| 160381 | atttattaca aaagtttcca gtagggtgtt tttgaatgtc tgtgccctct ggttttcaca |
| 160441 | aaactggtct taaggaagat aagatactgg tacacacaga agaaatatca gcctacgtct |
| 160501 | gtctcattaa atcttatccc cagatacttt gatgatattt aagtgtaatg atctcattct |
| 160561 | gtgtttctca ctcctgataa ttttttaaat gtcttatagc ttacaggttt attaaggtat |
| 160621 | ttgatttatt taagaactac ataattattc tcttcattca atggcttctg aaatattatg |
| 160681 | tttaattcta tcatttgaag gacttgggat tgttataaac aaatggcacg agcttctttt |
| 160741 | tgtcctgacc tagaagtagc aaagataaag ggagctgctt agttaacctg agtgagattt |
| 160801 | aataatcttg ggtatatttt attctagagt aagaagaatt gcaccctatt acttttattc |
| 160861 | agttttgtat gcagtagctt ctgttgtcta cttcacaacc accaatagtg ttatcataaa |
| 160921 | ttcagagtgt tgggctgtat tagcccattc ttgcactgct ataaagaact acctgagaca |
| 160981 | gggtaacctg taaagaaaat aggtttaatt ggctcatggt tctgcaggct gtacagaaag |
| 161041 | catggctgct ttctgctctc cagcctcctc atggaggcct caggaaactt acaatcatgg |
| 161101 | cagaaggcaa agttgaggaa ggaggtacct cctacatggc cggagcagga ggaagagaga |
| 161161 | gaaggggaag gtgctacaca cttttaaaca agatcttgtg agaactcact attccaggaa |
| 161221 | cagcaaaggg aaagtctgcg cccatgatcc agtcacctcc caccaggcac ctcttccaac |
| 161281 | actggggatt acaattagac atgagatttt ggcacaaatt tgaaccatat cctgggccat |
| 161341 | tctctatatg gagatgatgc ctgaatatga tttggtgact cagtctagca tccaagtggc |
| 161401 | tcattgttgg gcaattcttc tttagtcttc tttagggcta attttactca ttccttttga |
| 161461 | aaattggatt gatttacttt ttgtttggtt ttaagaaagc aaaatatcta aatgctgttc |
| 161521 | ttggcatagc ttatatacat atacatgcat acacatgtgt aattttcttc agatcaaaat |
| 161581 | atgcatcccc atcattcgta ttgctataat cagaaattag taatttgagg ggcaactgaa |
| 161641 | tgaccttata cctagagttt tcagagtata atattacaca gtgtgtattc ataagaatgc |
| 161701 | tgccttttaa agaggttttt ttttaaaaaa atcatagctt attttttata gtttcactgg |
| 161761 | tctgtcctcc cttttctctc tttttttccc ccttgagaag agagatttca catttttgtt |
| 161821 | aaggggctca taatttcctt atgaaatatg acaaatttca ctttatctta aaagcaaaat |
| 161881 | attaatagta cagacagctg aaggtggtct gagttaacct gagttacaca ttttatatat |
| 161941 | atatatatat atatatatat atatatatat atatgttaaa aatatttatt tgtcatatgt |
| 162001 | agcaagacta aaatgcaaaa ttttgcttta tgcttattct tttccagtat catttactgt |
| 162061 | aattctcacc ccatatttat ttttttactt ctctttctgt ttctctcctt tctcctctca |
| 162121 | ttctttttct ttcttttctt ctccctaccc catcttttag ttccatactt ttgaattgct |
| 162181 | atagtggact caaatctaag caagaggtat attagtaagt tgttcagtct tttaacaaag |
| 162241 | tatcagtcag agaagcacag cccagggata aaccaaaagc agaaataaaa ctgaggaatt |
| 162301 | aataatctaa ttcgtgttgt tttctttaca ttataggtgg ttcatttcat agcctacatc |
| 162361 | ttcaatttct caattctcat tagatctttc ttaacagcat ataagaccat tctaaatagc |
| 162421 | aaaaatagct gtatcctttt actcactgcc catcagttca taaagccact tgaattcagc |
| 162481 | tttttgccca cacaactgca ctaaacatat gcctgccaag atcatcaata tctctacatt |
| 162541 | gtcaaatcca gtggtcaatt ttcagtccac attgtactta gcaacttatg atacgtctct |
| 162601 | gatgcacatc ttctgccatc cacaatctct gactttcctt ctacttaaga gctgattgtt |
| 162661 | catttttgat ttcttcagtt tgttcttctc ctgttcctca ccattttgag tctccttttt |
| 162721 | ctgttttgtt taccctcatt ttctttgtta tctcatctgg tcttatggct ttaaatacaa |
| 162781 | tgtttttgct gataattccc taattcatat ttccagtcca gacctttctt ctgaactcca |
| 162841 | ggctcaaata ttcaactgcc tacttaatgt catgcttgga tgtctagaca gcacctgaaa |
| 162901 | tccaacggat ctgattaaag tcctgatctt taacagctcc tacctaagct attctcccta |
| 162961 | cagtcttcca tcttcttttc ctgtaattcc attcttcagg tgctcaagca aagaacctgt |
| 163021 | tgctatcctt gatttctcta tttctctcac atcctacagg gatgacatgg gttcatttat |
| 163081 | gcctgtcatg ccactgatta acatccctat caagaaagtt tagtctgagg taaaaacatc |
| 163141 | caatttgtat gagaagggcc aacattgaca ttcttcgtac acaaaaaaga atcctgagaa |
| 163201 | gaaacacaaa agagctaaat aatacattgc tgttgcagct taggtaggct ggagaagaaa |
| 163261 | cccatacata atctcaaacc ttactgttat aaagtcattc tttttttttt tttttttttt |
| 163321 | ttttgagacg gagtcttgct ctttcgccca ggccagagtg cagtggcgct atctcagctc |
| 163381 | actgcaagct ccgcctcccg ggttcatacc attctcctgt ttcagcctcc cgagtagctg |
| 163441 | ggactacagg cgcccaccac cacacccgga taatttttta tatttttagt agagacgggg |
| 163501 | tttcactgtg ttagccagga tggtctcgat ctcctgacct catgatccac ccgccttggc |
| 163561 | catttttttt tttttttttt taagagggag tcttattctg tggcccaggc tggagagcag |
| 163621 | tggcacaatc tcggctcact gcaacctctg cctcccgggt tcaggtgatt ctcctgactc |
| 163681 | agcctcctga gtagcbggga ttacaggcgc ctgccaccaa gcccagctaa tttttgtgtt |
| 163741 | tgtagtagag gcggggtttc accttgctgt ccaggctggt cttaaactcc tgacctcaag |
| 163801 | tgattcatcc acctcagcct cccaaagtgc tgggattaca ggcgtgagcc actgcgcctg |
| 163861 | gcctataaag tcattctttt gcatcaaata gtaagactca ttaaaggcag tggtattttc |
| 163921 | ttttactgtc tacaaaccct tatccaagag cattttctct atattccttt gtgagcacac |
| 163981 | aataaatggt aattcaataa gtgaattttc agtttccaaa ataataacct ggagctataa |
| 164041 | acattgcttc aagaagtaaa tgtgggtcag agaaaaaggc aataccattc aactcttctg |
| 164101 | gccacttggt cactgtgtta tcctgaagaa gcataaacta ctttcagcat tatagattta |
| 164161 | aaaagaagcc ccagaacaac atccactttt ctgaacgact cctatgcctc tgaaatgtga |
| 164221 | cattttgctg ttgtttcttt ttactgtttt taattactga gtctatctgc atgaaatgag |
| 164281 | gatctgggtt gcctaggagt tcatctgctc ctattgcata ttcctctttt aactacacat |
| 164341 | acttcaatgc agttttgctt gctgcctcca acattttgac agacttcccc tcctcttcct |
| 164401 | tcactatcct cccatcactc tccaggagac aaggttattt ttaaagtgca tgatcaatgg |
| 164461 | gcattgggga gcagctgagg catgaagaga tcatacgatt gggaataagg tactagggac |
| 164521 | tgctgagaga aggaatggca acatgccatc tcagacattg tctgagaaag gaaagggttt |
| 164581 | gtagctccca ttcaagtatt ctgagctatc tcttcacaca ggtttttgtc ttggagggag |
| 164641 | ttcttaacat agttctttag cattgcttta agttgaagga gatataggcc agtgctgata |
| 164701 | gttacttttc aggccaaata atgttccatt aaaatcgagc ttgctctgag gatcttggta |
| 164761 | gtgtcttaaa tctcctggtc atagtgctgc tatttggttc ttgatgctta tgacaccttt |
| 164821 | gctgagggtt tgaatcaaga acaaaacaag tattatcaca atgactataa aacatgactg |
| 164881 | ttccacgatc agacaaagga atgcbgttaa gcaaagaagg cacctaagga gaatgtggag |
| 164941 | atgaccatgc acagaccaga atcactattg gaaaaccaac tcaagaggag ggactgggtc |
| 165001 | atttctgcag cagtcttcat tgcatcactg agaaattgca gctctgtttt agttctctac |
| 165061 | ttgccaccac agggaatatc ttcccttatg gacttttagg ttttatttaa tggttattta |
| 165121 | taaactattc cttctgtgcc ggagaagatg attcatgact ctagccctgc tttttctctc |
| 165181 | ccgtggttat tagaggaaac tgagttgttg cttatctctt tagcttggga taccttattc |
| 165241 | tgctcttttt atttaatata taatctttcc taaagatttc cttatatttt tgttcattta |
| 165301 | gtaggttttt ctgttttatt taattaactt tatattatca cattctagtg aaataatcat |
| 165361 | cacaaatcat cctaatacat cgtgcaaatg ttttaaaaat gtgctttggt tgtgcatatc |
| 165421 | gcaaagtagg ctgtgggtca gcatttgcta tttgtcctca gctgtttctt ctttatatat |
| 165481 | aactgataac accctgctcc aatgttaatc ttatatcatt aaaattcttt cctagagaat |
| 165541 | ccttctttga ctgaagaagc ttagtggtga cattaattgc aaataaaaga ccatgaccta |
| 165601 | ttgtagaatg tggaatatct ccttagaagt gtctgccttc attattgcaa actttcagta |
| 165661 | gtgacataaa gatctttgtc ctgtgtagtt tcagttgcag ccagcaacag aaggcatatg |
| 165721 | ttcactttga acaaaagaac atttattttc acattctgtg gctgatgttg agtgataaca |
| 165781 | tttttgcata tcctaaaatt ttttacccag atgcbgttta aaggcaaaaa gtgcttttac |
| 165841 | aataatattc tttgtgaatg gaatttacac tcttggcatg tgttgccttt tcaatatgcc |
| 165901 | catcaagttc tgaataataa cctttgacag tgagtgaaca gaaacaaaac cagaggttgt |
| 165961 | ttcatctgtt cacagcaaca ctgtttgtca tctttgcttt tttggaaaaa tgtcattcca |
| 166021 | ccttaaataa aaatatgata aaattcatgt tttataagca agttaataga cttcgattat |
| 166081 | taagaaatat tttaattttt ccaaggcaag aaacctgtga tgaatgaaca ttaagttgac |
| 166141 | aaaagaaaaa aatatgccaa taaatatatt ttttcatatt actgtagtgt caaaaatttt |
| 166201 | ataaaacttt tatatgcctt tataaaaatg aagcaaagct aagaagaaga tgctgtatgt |
| 166261 | gttatggggt gaggaataaa cagaaaaagt gtcctttgtc ttggaaagaa ctgtaaaatc |
| 166321 | acctatctcc atgttgccaa agggaatcac atattgggaa atttaggcta tattaatata |
| 166381 | atacgtataa aaataattga aatagaaaag atctggcttt aagcattttt ctaaagactt |
| 166441 | tttcatgctt ggtaaaagtg tttggaataa attattctct atttttaagt agttaatttg |
| 166501 | gttattaacc taattggtat gggcatgtgg atatagcttt attaacaatt caatttctca |
| 166561 | tgaaataaaa taacccgaca aaccccaagt ctacttattg caatacagaa tttattttgg |
| 166621 | ttgaagttat tttgaattga gctgatagct tataactttg aattgggctt ataactgtta |
| 166681 | tgttttgcaa atccctgaag attatgaaat agaaaaatct ttgcatggca ttgtataaga |
| 166741 | tgctgtagct gtatatcttt aataaatcgt gctcattttg gcaagtttat ggaaaaattg |
| 166801 | tattaactgc acaaaaacat tatgataaaa acaataaaag taaaaaccac ttactaacaa |
| 166861 | ttgtacaggc atttaaataa ttgctgtact gttttctttc ctcaacagta caaatcaaag |
| 166921 | tggaggaaaa agaagacgag actgaggaaa gctcaagtaa gtggtgatgg gccacttggg |
| 166981 | atacatttcc tatggaatac cagtaaactc aaagaattta tcctcttgtg gacttgagct |
| 167041 | accatatgta agcagaagtg tgtgtggata acttttcatg gtctcacagg aggaatcaag |
| 167101 | ttcagcaaac agaatcccca ctctagagtc tatccagttg gcactataag ggccaagact |
| 167161 | gtgttccctt gattgcttgc tgaaaaatca acaagcaaaa gacatgttaa taggagaaaa |
| 167221 | ggcatataat ttcatagaac ttgtattcat taaagcctta ggatgaagac ccaaagatag |
| 167281 | agaaaattgt ccatttttat gcttaggttc aacaaagtgt ggatagcagt gtagaaatat |
| 167341 | gattggacga aaagggtata atctaatgtt tacatagagt ggggaaacac aacaaggcct |
| 167401 | gtctgcctag attcttcttg gcctctctaa gcatgcattt ctttcttctg ggtatggggc |
| 167461 | agggaccctc tttggaatga gggtcttatg atctacactc aaacaaggta ggtcggatga |
| 167521 | tttcttgatg accagttttt acacagacag ggcagaggga atgttagagt agtattttta |
| 167581 | ggtttcatgc atttgagaag aatgtttatt ctgttgttat tgggtagaat gttctgtata |
| 167641 | tgtctgctag gtctgtttga tctataatgt tgttcatgac tgctgtttcc ttattgattt |
| 167701 | tctgtctaga tgttctatcc attatggaat gtaatgtagg gtattgaagt ttcctactat |
| 167761 | aattatattg ctgtatattt tctctcttga gtttggttaa tgtttatatt taggtgctct |
| 167821 | gatgttggat gcatatatac ttataattgt gatatcttcc tggtaaattg acccttttat |
| 167881 | tactatttaa tgcccttatt tgttgcttat gacagtttta tactaaaagc atattttgtc |
| 167941 | cgatgtaagt atagccaccc ctgttctttt ttagctacca tttgcatggc ctatcatttt |
| 168001 | ccgttccttc actttcaccc tatgtgtgtc cttaaatcta aagtgaatct tttatagtta |
| 168061 | gcatacagtt gtttcttttc tttggtttct tttttaattc attcagccac tttatgtctt |
| 168121 | ttgattgaga agttcaatcc acttaaattt aaagttatta ttgatagagc aagactaact |
| 168181 | tttgccattt tgttcattgt tttctgtctt aaagctcttt tgtccctttt ttatctcatg |
| 168241 | ttattctcct tcatatttta ttgattttta ttatagtgat atactttgat tcctttctct |
| 168301 | tttcttttgt gtgtcttcta tagaaatttt attgtggtta ccatgggact catgttcaac |
| 168361 | atcttataat tataaaagtc ctattttaag tagaaaacaa tttaacctca attgcatact |
| 168421 | aaaactctac acttctactt tccttgacac ttaatattat tgacatcttg agttacatat |
| 168481 | ttttatatta tgcatccatt aacgtatttt tatagttact gttaatactt ttttactttt |
| 168541 | ataatacaat taaaagttac caatatactg tcattaaagt attatagtat cctgtatttg |
| 168601 | tctacatatt tacctttacc agacagtttt atattttcat gtgattttgt gttgctcttt |
| 168661 | agtgtcctct cttttcaact tgaagaactt cctttagcat tacttgtaag aaaagtctag |
| 168721 | gggtgattaa cttaggtttt gtttgtctga gagtctttat ttctctgtca tttataaagg |
| 168781 | acaaacttgc tgagcatagc tttcttggtt ggcaggtttc ttctttccaa cacttttaaa |
| 168841 | atatcatcct actttcttct ggcctgcata atttctgcta agaaatgata gtcttatgaa |
| 168901 | ggtttccttg tacatgacaa gttgcttttc tgtttctttc aaaattctgt ctttgtcttt |
| 168961 | gacttctggc aatttaagta taatatgtat tggtgtggat ttatttgggt tcacataatt |
| 169021 | tagggtctgt gggcttcctg aatctgaggg tccattttct ttcccagatt tgggaagatt |
| 169081 | ttggttatta ttttctttga atagtctttc tggccttttc tttcttttat tctccttcag |
| 169141 | aactcccata gtgtatatat tggtctgctt gttgatccct cataaaactt tcttgacttt |
| 169201 | ttcttattct ttttatggtt ttgctcttct aactataatt tcaaacatcc tatttttcaa |
| 169261 | tttggtaatt ctttcttttg cttgatcgag tctgcbgtta gacctctgta gtgaatttct |
| 169321 | gttactctat tcttcagtta ttgtgttcag ttattgtctt gtactcttca atatttatct |
| 169381 | ctggttattt ttatattttt atttctgttg aaactcatac tttgttcatg catttttctt |
| 169441 | ctgaatttgt tgagcatctt tatgagttat ttttaatagt ctgttaagta attcatatat |
| 169501 | ctccattata ttagggctgg tttctggagc tttatcttct gttgtttggg gtatgttttc |
| 169561 | ctgtttcttt atttttcttg attttgtttg tttgttttgg tatccatata ttagaaaaaa |
| 169621 | cagattcctt tcccagcctt caggagaagg attagccttg tacaggagaa gagtttcacc |
| 169681 | aatgaggcag gccagagatt cttgggcctc tcaaacattt cctgtgtatg catcgtctct |
| 169741 | ggacttgtgt gtgtaaattc tcaataagag ggatttttca gttgactttt tctttttaag |
| 169801 | aattcataat ctcttgttcc ctccagtgtc cttctgtcat aacatgtgtc ttctgaggaa |
| 169861 | gcagcatgtc ctgagttctt ttttttgttt ccagtagtcc ccaggcatca acagtatgct |
| 169921 | gggtcctgtc catgccctga gactggtcat tcccttaggc agcctcctga gaagtctgaa |
| 169981 | cacagggtat atatttcagt cttttatttc ccatttcagg ggcaagtcaa gggctggaat |
| 170041 | tcttgccaac tgtgtcatgc tgaactgggg gaaggggctc tggtgaatga gtacaaacta |
| 170101 | attcaaaact tcacctttgt tctccatggc cctgggccat ttagaatatg ctgggtccta |
| 170161 | ttagtgctct aggagacaag tgggacagaa gccagtccag tcatttttta gaaaagttgg |
| 170221 | agtgttagat gcactatcca actgtttttc tccccagaga ggtgcagatt tggtgtttat |
| 170281 | catctggtta ttctgtgcta aattggggga gtggctattt gagtgaggca tactattcaa |
| 170341 | acggctatct ttgctctcat tggttcctaa ccagaggtct tttcctgtca gtgctcagat |
| 170401 | tctggcaaga cagaaaccag tcctttggga acctccagaa aaatcagaat gttgaacaca |
| 170461 | tggttcagtt gttttctccc ctccccaggg agagactggg agatgatggt tttctcccag |
| 170521 | ttgtatggta ttgtgttagc agagagggat tatggtgtga gggtgtgtca gatttttcta |
| 170581 | ccagctacct agctgatttt gtgttcatct agggttcagg cacctttcaa ctagtttccg |
| 170641 | aatttctcac gaagggagct tatctccaca ttgtagttga acttttatgt ccatggaggg |
| 170701 | aaggcgggtc cagggcttcc tattttgtca tcttgttgat gtcatcccag tagtttagtt |
| 170761 | ttaatacaaa aaatactaaa attcagagta ccaagtagct gcttgggttt gtgagttatt |
| 170821 | agtgggtaaa ttgtttcttg cctcctgtca agtttttgtc ctttctttaa ttagtgacta |
| 170881 | atgtggctaa taaaagcagg gtaaatattc agaatgccat gatggggttc aaataacata |
| 170941 | catttgccac aatattaaac aaacagaaac tcgttcttga tttggatgac agaatatata |
| 171001 | tacagttttc caagcccagt tagaaaagtt attatgggcc gggtgcgata cctcacacct |
| 171061 | gtaatcccag cactttggga ggccaaggca ggtgaatcac ttgaggccag gagttcacga |
| 171121 | ccagcctggc caacatggtg aaaccccatc tctactaaaa atacaaaaaa ttagctgggt |
| 171181 | atgatggcgc acacctgtat tctcaactac tcaggaggct gagacaagag aatcgtttga |
| 171241 | actctggagc tggaggttgc agtgagccga gactgtgcta ttgtactcca gcttgggtga |
| 171301 | tagaacaaaa ttgtgtctca aaaaaaaaaa aaaagtgaag ttattctgtt ttttactctc |
| 171361 | tgctacctga catttagtaa tatatgtaat atttagatct tatacctgaa atatcaataa |
| 171421 | aaaagtttta acaagtggta attaaagata attttgaaaa aataaaatga tgactcacac |
| 171481 | gtatgtgaaa agaacatatt taactaataa aacaacttgt gagatgctat aatcagttca |
| 171541 | aaggaacgtc caaagaatag atacatttat agataataaa tattgaaatg attgtacaaa |
| 171601 | tgaaggcaaa gttgtttttg aaagggggct tgtctctcct ttggaaagag ttcatttgga |
| 171661 | tgtctacaga taaaaagtgt tttgtattgc tatatatggt tatgtataat tttcaaagtt |
| 171721 | gtcatatagt tctcataaaa tcagaatcag ataacacaga aaggtatgct gcagataatt |
| 171781 | catagttttc cattgaaata taattttttc tctggggtag cctctattta agagagtaat |
| 171841 | gataactgta atatttaatt ttttacagta gtttatgcta aatgttagaa gttaggagca |
| 171901 | atagaaatga aactggaata gtaatgttat gttataaact ttgtgaagga aattttatct |
| 171961 | taattatctt aatttatctt aattatctct ctattcttta cctggaagca tcctaaaaag |
| 172021 | ttatgaacac atgaggcatt cattgttgtt gatgatgaaa caaaataatg ctgtcattat |
| 172081 | tctcaatttt acattaaatt tatgttacct atttctattc ataagaaata aatgatcaag |
| 172141 | caaatgtgta tactactttt ttttttaaag aaaagaacaa aaatattgag gaaaaaggag |
| 172201 | aaaaatattt agaatcaaga atgaagaaaa tttaaattga gaggaacctc aagggttgaa |
| 172261 | tgaatttctc caaaattatt ctagtttgta gcacctcttt aacgttcctc ttctttgttc |
| 172321 | taagatagaa gtagtaataa atatgaagtg gttaatcact caacaattat gtaatggaat |
| 172381 | ggtaatctct aaacttggac ttatttgaat ggtcttagag gtcatggtat gatattaacc |
| 172441 | accaagctat ttagttactc aagtaaatga agaccagaac ttcttcaaaa acttattaaa |
| 172501 | atttgggaat ccacattcac ctatttgagt cggtgaacca caatggaaat ggaaatctag |
| 172561 | atacatttat ttaaatgatg ggctatgaaa tatgtattcc atgatgcatc ccatcacgat |
| 172621 | gtggagaatt gctagactgt gcbgtcagat gtgtaataat agttattaaa aactaagaat |
| 172681 | aagcttggta gtgggaggaa gcactttctg acattactca ttgaatcaag tgctatgttt |
| 172741 | aggtgaagag gaagaggagg tggaagataa gctacctcga agagagagct tgagaccaaa |
| 172801 | gaggaaacgg accagagatg ttatcaatga ggatgaccca gaacctgaac cagaggatga |
| 172861 | agaaacaagg aaggcaagag aaaaagagag gaggaggagg ctaaagagag gagcgtaagt |
| 172921 | tagttctgat attctttcaa aagttccaat gctgaagaag atcactcctt tcagatactc |
| 172981 | tttgacctta aaattggtaa ttaaagctac ttttagaaag agagccttaa tctgatgatg |
| 173041 | ctattttatt ctacttaatt aaatgtattt taatggttaa aatagaattt taaaatgaat |
| 173101 | atatattaaa aatggaccat gagaaattct cttatgaagg atctgaatta tcataggtcg |
| 173161 | ttgacatatt acagttaatt taaagatttt aaaatttccc cactaattgt atgcattgtt |
| 173221 | atctaggtta agtagaaact cctaaatagt gagcaaacat cactttatct tacagagcag |
| 173281 | gggttggaaa attatggcta aatccagccc aagaggtaag aatggttttt acagcttcaa |
| 173341 | agggtcatta ataaaaagca acaaatatgg gacagagttg tacatctcac tcaaagctta |
| 173401 | aaatattaac tatttggccc tttatagaaa gaaagtgtgc tagcccttgt tacagaggat |
| 173461 | ttgggttgtc attttctttt taatacaact caatatcttt tagttccacc aggaaaacat |
| 173521 | tttagtaaac gctgactttg tgtagaataa tgcattaaat gcbgtttagg aaaaatccaa |
| 173581 | gaaaatactt ttcttctttt tgctttttgg aaatttgcag atagcaggca ggtaggaaaa |
| 173641 | atgtacgtgt aaaacacctc taattaaaga gaaaacctag accccttgga aagaatgcaa |
| 173701 | gagaacagcc aacctgttcc acaactcaca ggtaataggg ccatgcgagt cgccatcagg |
| 173761 | tggtggaatc tcctccaaac actcctagga ctttgaagca tgaggaactt tctaagatgt |
| 173821 | cctcccaaga tgacacactt ctatactcaa tagctctaac tattgtgtta ttccttataa |
| 173881 | atgattgtca ttaaaaacaa ctgaatgaaa aatttgtcaa gtagagaagc ttagcattaa |
| 173941 | caaaaaatgg tttcttttag aataagaata acaccatcta cttcatgtct aagttttcct |
| 174001 | cctcctcttc cccagctttt cctttctccc ttttgaatac caagacaaaa cttgctttta |
| 174061 | aattttgact ctagtatttt ttatttatat ctgcttttaa agtttcttta tgctttattc |
| 174121 | ctttcaaaaa taaaatgcaa cacattttat gtcccatgta ttactatgat tgttagttcc |
| 174181 | attattatgt agtaatagtt cctatttagc aaagcttatg ctttccaaca gtggtatttc |
| 174241 | attgagaaaa catctccaat tgatgtatgc atgatatagg ttgtgttcca aaatttgctt |
| 174301 | ttcctctcta tttatgccgc aaaaaaatcc ttttaaaaag atgagttgga caggaattcc |
| 174361 | tctgctctct tcgtctgctg atggccctca tggcaactgc tcaacttcta ggaaatgggg |
| 174421 | ccatgtgaag caactggatc ctgtggctat gacagtgtct cttcctagct ggcctcactt |
| 174481 | tcattttgat cttgagaatc aagatccctt acctcccact cttccacata acccaactct |
| 174541 | ctccataggt tttgcaaatt gtatttttgc tgcgacaatt tgtgcatcta ttataaatag |
| 174601 | tatcagaaat tagttgtgat tattgatagt tctgttctct attttagagt ctattttcta |
| 174661 | ttgttcattt tgaagataaa catctttttt ttaaaagaaa atcttagata atatttttga |
| 174721 | gaaagattag tagccaaatc agggcacatt tatgtaggtt aattaattca gggtattttt |
| 174781 | tatttaacta ttcaagtaat gcctcaggga atttcccttg cattgacaca acatttgaaa |
| 174841 | ccaactaaaa ccaaggttgt aatgctaact atctttggag gcagttaaaa aaacactgcc |
| 174901 | ttgttagaca ttttggagta tttccagtaa tattacaggc ttttcctgac ccagttttaa |
| 174961 | gtggataagt aatatattca tagcagtgag aaattcagca tattatgcct tcttcttcct |
| 175021 | aacaactgtt gtttaaatat atcaaactta agatagaaaa ccattcttgc acagattagc |
| 175081 | ctgaaaattt agatgaggca tgcctatgcc ttttaatatg attagccctt tctttgagtg |
| 175141 | attctagaaa agcaggtttc ctgtaatgct gattagaaaa gtattttaat taccttcata |
| 175201 | tttgagggta acttatgtgt caacaactgt accctgtaac acagcctgat cctcctggtg |
| 175261 | aaataaacaa ttaacaacag agacttaaaa gatataccaa tctggggtca tttagtacag |
| 175321 | gaataaacgt ctttccatac cataataatc tcagaggtag ttgttatatt ttagtgtact |
| 175381 | ttgagcactg ggtttatgat gataaccctg agcaatccag aaaagttttg tatacatatg |
| 175441 | ttcattcaat aagttattta cccagctcta cttttgtgca acctaatttg cttatatctt |
| 175501 | tgggatactt ggatatgaac atgtaattgc ccacaatctt gcaatcttca aaagtccata |
| 175561 | atatagtaag ggataggcca cttagataca aattattatg acataagaaa gtatatgtgt |
| 175621 | cccagagaaa tacaaacaaa gtagcttgga gtctcagaga agtgaaaact gttctcacag |
| 175681 | ggatagttag aaaagggatt cttaaagaca tttcatatga tttttaaagg acttgaaatt |
| 175741 | tggacaagct gaacttataa actatttaat tagtattaga attgtttcta ttaaagggtc |
| 175801 | tctgaaagtt ggcctgtagg tttagttacc tggcaaatcc acacatcaaa tagataattc |
| 175861 | tttcattctt tggtgatgtt ggattagaga tgcbgtttta catgtgattc ttaatggaag |
| 175921 | ttcagtagtg taaagcttta aggtaattat atgtaaatat catgaattat tttgaaatgg |
| 175981 | ttggcaagtt aaaggcttaa catatcaagc aattaaatta ttaatcataa agattttttc |
| 176041 | taattgactt tattactgat aatttcttgc catctgtttt attttatttt tgctagtttc |
| 176101 | tgaaaatatt tcaataaaac tgctatctat gtaatttaaa gttattccta tgtttgcatg |
| 176161 | gaaacaattg tgatcatttt aattaaaaca catctttacc tcctaagaca aactaaccca |
| 176221 | catatcattc taattggcaa attaaaaaaa aaaattgtgg atatagatag agtaaaaaaa |
| 176281 | atcctgaaat attttatgcc atggctacac agcatcatag gcttttatat gataaacacc |
| 176341 | aaataatgaa aatagaaaca acccaatggc tatcagagat gtatcttaga agagtgtact |
| 176401 | tccctggttc tcttgaacca aaatgattat tctaagcaaa atgtttgaat tgtccaaaaa |
| 176461 | acaaactgtc aataggaagt gttattttaa agggttaata tgaatttttg tttcagtaat |
| 176521 | catagcatga ttaaaaacta taaattggtg gcaaataaag gagattgaaa gtcattttgt |
| 176581 | aaggtgaact ataaaactgt ggatatgtcc ttttcctcaa ctagaacttt aaaaagcagc |
| 176641 | ttttgcctta tttctactgt atctagtcat aaattatttt tctgagtaat actgaattgg |
| 176701 | attacaattt ttgttattgg tcaatatcta gtgaggggag aaacttcaac agttaattga |
| 176761 | acagagagaa tttaataagt gaattgttag gaggtataaa tgttaattag actgcagaaa |
| 176821 | aggtaaaaag agaacactaa agtatcatag tgacggtaac tactggaagc agctaccatc |
| 176881 | ccaagggctg gaggaacaat ggaaagggtt gaaacgaaaa cactgtagcg tagaggaaag |
| 176941 | accctaggag ctaaaactca ggcctctgca gaggggctga tgctctgtgg tgctggtttc |
| 177001 | tgtgggagag gtgatgaagc tggttctgct agtgttggta atattggtga taaggattca |
| 177061 | cttgcagtat ggcaaggacg ctcagctcca ggagtgaaga agagatgcta aggaggaagt |
| 177121 | gtcaccccac aaagcaaata tgaagcagag aggaagccac aggaaagacg gagaccctct |
| 177181 | tcagtatccc ctattgtcag agtatatatt gacccagcta acaaagcaga aatatgactc |
| 177241 | acaaaatacc agccccagca ccacaatatt aaagtgtagg agggtgtgtt tgaagttggg |
| 177301 | acaatagctt aaaaactgaa ataatctatt accaaaaagc tgatctctac aatgtggtat |
| 177361 | tgcatgcctc gatttaaaat tatgttgctc ttgtttagat tttgtttcct ttgagttctg |
| 177421 | gaccgcatag tgttttcgta atactaggaa cacagaaaag aaaagctaca tctcatgctc |
| 177481 | agtaggaact aaattccttt gaagatctct tcaaaggatt cacttccacc aaatatattt |
| 177541 | caaggtgaat tttaccaaat gaagttataa gtttaattaa cagataacat taagttacct |
| 177601 | ttgagaaata gatttttatt tttcccgatt tcaatttttc tttctttctt tctcttgaga |
| 177661 | cagggctaac aaaattttta agggcaaaga catcttcacc cctaatttat tatccttatt |
| 177721 | gagaaataaa atatttaaac gaaatgtaga attgagggaa ggtattcaag ggaacaaaga |
| 177781 | agagagggaa atatcttgat atatctgtaa ttattctttc cacagatttt ctggttcaga |
| 177841 | gagtttgagg ctctagacat aaaagaattg cttagggcgg gtgcggtggc tcacacctgt |
| 177901 | aatcccagca cattgggagg ccggggaggg tggatcacct gaggtcagaa gttcaagacc |
| 177961 | agcctggcca acgtggtgaa actctgtctc taataaaaat acaaaaatta gccgggcaag |
| 178021 | atggcagatg cctgtaatcc cagctactgg ggagcctgag gcaggagaat tgcttgaacc |
| 178081 | tgagaggtgg aggttgcagt gagccgagat tgtcccactg cactccagcc tgggcaacag |
| 178141 | aacgagactc tgtctcaaaa aaaaaaaaaa aaaaaaaaaa gcccggctta tgcctgtaat |
| 178201 | cccagcactt tgggaggccg aggtgggcag atcacctgag gtcaggagtt cgagaccagc |
| 178261 | ctggccaaga tggtgaaacc cccatctcta ttaaaaatat aaaaattagc tgggctaggt |
| 178321 | ggtgggcgcc tgtaatccca gctactcggg aggctgaggt agattgcttg aacctgggag |
| 178381 | gcagaggttg cagtgagcca agatcgcacc attgcactac agcctgggtg acaagagcaa |
| 178441 | aactccatct caaaaaaaaa aaaagaaaag aaaagaaaaa aacagaatgg cttagattca |
| 178501 | gattcaggaa ggcaaacact actgcttaaa gttataatag ttccagtaat cctgcatcag |
| 178561 | tgttcagatt tgagttctca tgcttatggg tcctaatgtt gactgcatat ggttacattt |
| 178621 | aaaaaaaatg agctaaatat ctgatacctg ccttccttaa gttccaaagt caagcaaagc |
| 178681 | ttaactttat taaggtgttt cttttttact tttaaagaga agaagaagaa attgatgaag |
| 178741 | aggaattgga aagattgaag gcagagttag atgagaaaag acaaataatt gctactgtca |
| 178801 | aatgcaaacc atggaagatg gagaagaaaa ttgaagttct caagtatggt gccacttttt |
| 178861 | ataagtagaa acactttccc tgatattgat tttctaaatc ctctgaatat tccatatata |
| 178921 | tatatatata tatatatata tatacacaca cacacacaca tacacacaca cacacacaca |
| 178981 | tacactgtat atatagtata tgtaatacta tatatatcat ttatatatga ctcattatat |
| 179041 | ataatggtca cagtcataaa catgtatatc atatttctgc atatataccc aaatatatgt |
| 179101 | atatttacat atatctgttt cttatcacta gagagactgg gctaatgatt ataaattgga |
| 179161 | agcaactctg agaaattatt tagagtcttt taaattcttt ggtcatcttt aatcatttgt |
| 179221 | tccttaaact ggagtttcct tagcttaata catttgttac catctctttg aaagagataa |
| 179281 | tatatttgaa ttttacaagt ttgtgtggat tgtgcactct tgtttctctt cagggccctg |
| 179341 | gtctcaaatg aacttttcat gtgacagctt acattaaagc acagagaaga tgctaggcca |
| 179401 | acagaatagt aaataggatt ccaattaaag gttatgctaa tagctattcc ccgaacatgt |
| 179461 | cagtgaccca atttcagtct tatgttgatg ctaatgtgga cgcgaacgca gtcagagcac |
| 179521 | acagatttat aaactcttca tatgaaaagt caaatgatta tcctattctg ggggatggga |
| 179581 | agattcaccc ctgaggatca cactatattt ccctgccctg gtggttggga gaggaggaaa |
| 179641 | gggcagggaa aagggaaact gtttgtgata acagccatgt ttgcatctcc tagttttgcc |
| 179701 | aaagattgca ttcttccata aatcattttt ataaatagta gtaagtttta aaaactatcc |
| 179761 | cttcacaagc ctatttaact agtaatgctg taaaaatgat agtatagtat tattgtctct |
| 179821 | gatgatgaaa acaagaactg aaatagctat caggataatt cacttctagt cttggttctg |
| 179881 | caagagcttg tgtgctattt aaaggtatcg cttaatctcc tgaagcctta gttacctcat |
| 179941 | atccaaaata aagaaagata ttctatatct tctctgtgcg cttgaagcgt agccatcatt |
| 180001 | tatagtattt ttgttttgtt ttgtagagta aggttttcca agttctaaac aatggttttc |
| 180061 | ccagaaaact tttgcaacac cacaaaattg cagtctggga actccctttg catgctcatg |
| 180121 | tacacatcca tcataaatga aggcaaaggc aagcagcatc ctacgttcca cagagctaca |
| 180181 | aattttgtgt atgcatgctc atgtgtctgt acattaaaat aattttcatt tagcgaagtg |
| 180241 | ataatgatgc taaattatag gttttaaaaa tattcttacc tggcaaaata gaagtttggc |
| 180301 | aaccctatgt gggcctctca aatatatttg aaatattaat gacccataaa gtccccaaac |
| 180361 | ttgggaactt cagataacta tatatagaaa gtttaaaatt ggagcaatat tgtgaacttc |
| 180421 | caaaatatat gattgaataa aaattccaag gactaccttt cctttccaac tgcatggagg |
| 180481 | tgtagaaata cccccctggt ctttgcccgt atctctcgtg caggatcgtg gaggagacag |
| 180541 | cagcttcaga tttgagttag gatctcagat cttccattta atagctgtgc acatttgatc |
| 180601 | gagttgtgta gtctctctac acaactcagg ttccttatga aattgtacct tattgacaga |
| 180661 | gtttttggaa ttataaaatg agataattta tgtaaaacat gttgccagaa cttggcacat |
| 180721 | agcbgggaaa cctaagttgt agttattact tcatctcaga acagacttga tgcccaattc |
| 180781 | ctgaagggtg acaagagaga tggagagaat ttgggacctg gcaagtctag gtgggagcag |
| 180841 | acctagtcac aatcagaccc cagaagcctt gtgggatggt gacacattgg taccagtttg |
| 180901 | gataaacaat aagattttga ggatgcaaca gaaggaagta aggcatttga caatttagca |
| 180961 | aaatccagga ccagaccgtt ctcagatctt ctaaaacata gccatagttc tgtggcagat |
| 181021 | ttcaaggtct caggccttgg tctggagtcc aagagttaag caaattttag caatggggag |
| 181081 | agataggcat tagcattgga aagaaggaca atacgagccc ttagtacgaa agcagacact |
| 181141 | gacaataagg agaccgcacc tgactctaat ctagacatag gtttttttat ttggcccaca |
| 181201 | tgtgttttgt ttctttttct tttatttttt ttaaccgtgg caatatatac aatacaaaat |
| 181261 | tcaccatttt aaccatgaaa tcgattttct ttatcataat ttttttcaat atttttaaaa |
| 181321 | atttaaatta cttttttttt ctcgagacag ggtcttaact ctgttgccca tgctggagtg |
| 181381 | cagtggtgct atcttagctc actgcagcct caatctcctg ggagcaaggg atccttctgc |
| 181441 | ctcagtctac cacgtacctg ggactatatg tgcacactac catgtttggc taattttttc |
| 181501 | tttttgtgta gggatggggt cttactatgt cgcccaggct gatctcgaac tcctggcctc |
| 181561 | aagccatctt cctacctcag cctcccaaag tgctgagatt ataggcatga gccactgcac |
| 181621 | ccagcctcaa tcttttaaaa gtgggagtaa aatattcaga tgttcagctt ttcatgaaca |
| 181681 | agtggaagat ttggtcctac attcttccat cacagtaaca gctaggacta agcacctggc |
| 181741 | ctctattaat ggggcattcc tttttcaatt tgcaccattc tcaaacaatc catattactt |
| 181801 | gtttatgctg cttggctgga ccctgtagac attcagattt gctgcctcct accagtgcag |
| 181861 | ctggggaaca agctaggcat gttaccaaga cggtgattca gatcttcaaa gccaaagtca |
| 181921 | gctcacagaa tggaagcaca aatttagtcc cagaaaagaa acaactgtgg cttctcacat |
| 181981 | gtcagcaagg ctcacagtct ggtgatgatt ttccatggcc agaagtggtt tctgccttgt |
| 182041 | ggccgcacct atgggttcca gctggtgcca tggccggggc cagcctaatt cttttggttt |
| 182101 | cagtctccgt gatgaagttg ttggtactta agtgcctgac ttatctctct ttgaatgctc |
| 182161 | tattgagctt tttttgaatg ttctattgag cttctcccca ccagattcca actacattat |
| 182221 | tagaacaagt ggtcagtact tcacagaacg tgcaggtaaa tgtttctcta ccccaatgcc |
| 182281 | accaatgctt gggagtgagg cagctttccc tctacccttt atttctttca gagacatcta |
| 182341 | actttgagag cgtgtttcta aggattatgt tattaatatt ccccaaatta gcctgcatca |
| 182401 | tcgctcctgg ctaagtctgt gaaacccaag atactaagct cagtgtaact gaaagagatg |
| 182461 | ttttgatcac agctttgaat ctgtgcctgg gttcgaagcc ttcttgttct ggacttggag |
| 182521 | aaagttttga aacttctaaa agatatttta gacagtgtca gggttttaag atatatttta |
| 182581 | gagtaagcct caggaatggc aacttatggt tctgagggtg ttatgggaga ctcagagata |
| 182641 | gttcccacat ttttaaagag catctaccat taggaacccg agcacactca gggcttagga |
| 182701 | tcaaaagatg gttaatataa gtggttgcta cataggcagg cagctctagg aattggttgt |
| 182761 | gaatccatat taatcctcaa acatggctca ggagctagag ttcagcattt tcaagatagc |
| 182821 | agaattggct ctatacagct gaaaggaagc catctccttt tcatcatcac tgtggaaatt |
| 182881 | gtgattttca ttctatgttt tattgtatat caatacaatt tcacacattc ctgtagcctt |
| 182941 | aaacctactg aatgataatc tcttggtgga aaggcaggtg tgtctggccc agaccagaaa |
| 183001 | tgtatatttt tattttttga tctaaaaatt actgatatat agtcagaatg aaagctgctg |
| 183061 | ttttcaattc tgagagacag aaagctccac taaacagaat actcagctct acagatgatt |
| 183121 | tatacaatga ggaagagtgt gtgtagggag ttggaggggg gtaagggaaa cagtgtcata |
| 183181 | ttttccaatt atttgaaagt caatttctat attttattaa tcacatcatt taaaaatatc |
| 183241 | cattaatgag aatactaagt ataatctgtt tttaagctgt tcatgggttt aattcagagg |
| 183301 | ctgtatgact agatctttcc tacctataag aggtcgcagc acttacctga tagcagccac |
| 183361 | cacaagtgaa ataaaatacc caggtagaaa gtaacaggtc tacttattac ttgtcttgaa |
| 183421 | acctaagact tttaactgta tcagaacatt atatgtggta gattgaaagt gctcatgact |
| 183481 | aaacctaaat aagcaaccac cttattttgt tacagtagaa taggttttag actgaaaatt |
| 183541 | gagacttgga ctttgagcta agtgcttcct ataacttctc tttgaacctc catttattca |
| 183601 | tttataaaac agataaattg gattgtggac catggtcttc aaactgctat cctccaaagt |
| 183661 | caagcagttt ggtgaaatca aatcagggca aaggaggcag aggtcgcagg gagagctact |
| 183721 | gggccacaat gccggcttca aaaacagacc tatggtttct ctcttctaca cagtgtactt |
| 183781 | ccatataaag cattgattgg aagaaagaat gcttctgtgg ctattaaaat aaaaaacagt |
| 183841 | tttaaaaacc cacttagctg gatatttaaa gaaacttatt ttggagaagg gacagttcta |
| 183901 | acatttcatg agtctacaaa ttaggataca gaaacactcc aagtatactt ttgcagggaa |
| 183961 | ttggcttttg gatagacacc attttaaaat gatttatttt gataacaaaa atgtttattt |
| 184021 | agctattata ctgactactt taatttctga gctttgtagt accctgacct attgtttctg |
| 184081 | ggagttgtcc attggctggc taggcctggt gatttattaa tgagacaccc agtaaagcca |
| 184141 | ggaaagttat cctcagattt cattcacact taaacaggtg cttcaaactg tcagctggcc |
| 184201 | attaaggtaa cattcctcct tactcaatct cccttgatct tttcacactt cttttcattt |
| 184261 | gtttgtttgt tttttatttt gttttatttt ttagttggga gaatgaatac atttttagga |
| 184321 | aagtgaaaac agaccatggt tgatttcctc taatggagct gttgggaaaa ctttgggaaa |
| 184381 | actatttatt tggcttccat tctcaccctt tctctcctgt tttcttgtag cttaagattt |
| 184441 | tcacaggcaa gaatcatggt ttatacttta gtttttctct catctgtcat tgtgaaggaa |
| 184501 | taaaagatgc tatacaagag gacatttaag cgtgtgaaca cacccaccaa cataccctca |
| 184561 | aaccattctg gattattttc ttttttaaat tttatatttc cataagtttt tggggaacag |
| 184621 | gtggtatttg gttaaatgag taagttcttg gggaacaggt ggtatttggt tacatgagta |
| 184681 | agttcttctg tgatgattta ttagattttg gtgcacccat cacctgagca gtatacactg |
| 184741 | aacccaattt gtagtctttt atccctcatc ccaatcccac cctttcccca gagtccccaa |
| 184801 | agaccactgt atcattctta tgcatttccg tcctcatagc ttagcttcca cttacgaatg |
| 184861 | agaacatatg atatttggtt ttccattcct gaattacttc acttagaata atagtctcca |
| 184921 | gttgtatcca ggttgcbgtg aatgccaata tttctttctt tttctttttc tttctttctt |
| 184981 | tttttttttt ttgagatggg atcttgctct gtcacccagg ctgtagtgca gtggcgtgat |
| 185041 | ctcggctcac tgcaaccttt acctgccagg ttcaagcgat tttcctgcct cagcctcctg |
| 185101 | agtagcbggg attacaggca tgtgccacaa cacccagcta atttttgtat ttttagtaga |
| 185161 | gatggggttt tgccatgttg gccaggctgg tcttgaactc ctgacttcgg gtgatctgcc |
| 185221 | caccttggcc tcccaaagtg ctgggattac aggcgtaagc caccatgcca ggcccaaatg |
| 185281 | ccaatatttc actccttttt atggctgagt agtattccat catgtatata taccacaatt |
| 185341 | tctttatcca ttcattgact gatggacatt tggtctggat tcatatttct gcaattgtga |
| 185401 | attctgctgc tataaacatg catgtgtaag tatccttttt gtttaatgac ttcttttcct |
| 185461 | ctgggtagat accctgtagt gggattgctg ggtcaaatgg tagttctact tttagttctt |
| 185521 | taaggaatct ccaccctgtt ttccatattg gttgtactag tttacattcc caccagcagt |
| 185581 | gtagaagtgt tcccttttca ccacatccat gccaacatct attatttttt gatgttttga |
| 185641 | ttatggccat tcttgcaggt gtaaggtggt attacattgt ggttttgatt tccattttcc |
| 185701 | tgatcattag tgatgttgag cattttttca taagtttttt ggtcgtttgt atatcttctt |
| 185761 | ttgaaaattg tctattcatg accttagccc actttttgat aggactgttt gtatttttct |
| 185821 | tgctaatttg tttgagttct ttgtagattc tggatattag tctttgtcag atgtagagat |
| 185881 | tgtgaagacc ttctccctct ctgtgggttg tctgtttact ctgctgactg ttccctttgc |
| 185941 | tgtgcagaag ctctttagtt taattaagtc ccacttattt atctttgttt ttgttgcatt |
| 186001 | tgctttgggg ttcttggtca tgaagtcttt gcctaagcca atgtctagaa ggttttttct |
| 186061 | gatgttatct tccagaattt ttatagtttc aagtcttaga tttaagtcct tgatccattt |
| 186121 | tgagttgatt tttgtataag gtgagagatg aagatccagt tttattctcc tgcatgtggc |
| 186181 | tagccaatta tcccagcaac atttgttgaa tgaatagggt gtcttttccc cacattatgt |
| 186241 | ttttgtttgc tttgtcaaag atcagttggc tgtaagtatt tggatttatt tctgggttct |
| 186301 | ctattctatt ccattggtct atgtgcctat ttttatacca gtagcctgct gttttggtga |
| 186361 | ccatagcctt atagtatagt ttgaaggaag gtaattggat gcttccagat ttgttctttt |
| 186421 | tgcttagtct tgatttggct atgtggcctc ttttttggct ccatatgaat tttagaattt |
| 186481 | tttttctagt tctatgaaga atgatggtgg tattttgatg agaattgcat tgaatttgta |
| 186541 | gattacttta ggtagtatgg tcattttcac aatagtgatt ctacccaacc acattagcat |
| 186601 | ggatgtattt ccatttgttt gtgtcatctg tgatttattt cagccatgtt ttgtagtttt |
| 186661 | ccttgtagaa gtatttcacc tccttggtta ggtataatcc caagtacttt tttttttttc |
| 186721 | ctgtggctat tgtaaaaggg gttgaatagt tgatttgatt ctcagcttgg tcactgttgg |
| 186781 | taaacagcag agctactgat ttgtgtacat taattttgta tcctgaaact ttgctgaatt |
| 186841 | catttattag ttccaggagc tttttggagg agtcttcagg gttttctggg tatatgatca |
| 186901 | catcatcagc aaacagtgac agtttcacct ctttaccaat ctggatgccc tttatttctt |
| 186961 | tctcgtgtct gattggtctg gctagtacta tgttgaatag tagtgagagt gggcatcctc |
| 187021 | gtcttgttcc agttctcaga gggaatgctt tcaactattc cctgttcagt attatgttgg |
| 187081 | ctgtatgttt gtcatagatg gcttttatta cattgaggta cgtcccttgt atgccgattt |
| 187141 | tgctgagggt tttaatcaaa atgggatgct ggtttttgtc aaatgctttt tctgtgtcta |
| 187201 | tttttttttc gggggggtgg gtgtttaaga gcagaaagtt taataggcaa aagaaagaag |
| 187261 | agaaaaccac ccccatgcag agggaggggg atcctctctt gctgcatcta ttgagatgat |
| 187321 | catgtcattt ctgttttaat tctgtttatg tgttgtgtca catttattta caagtgtatg |
| 187381 | tcaaactatc cctgcatcca tggtatgaaa ttcacttgat catagtggat tatctttttg |
| 187441 | atatggtgtt ggatttggtt agctagtatt ttgttaagga tttttgcatc tatgttcatc |
| 187501 | agggatattg gtctgtggtt ttcttttttt gttttgttct ttcctggttt tggtattagg |
| 187561 | gtgatactgg tttcatagaa tgatttaggg agtactccct ctttctcttt cttgtggaat |
| 187621 | agtgtcaata ggattgaatg tctgatagaa ttcagcbgtg aatctgtctg gtcctggact |
| 187681 | tttttttgtt ggtaattttt aaattactat ttcaatttca ttgcttgtta ttggtctgtt |
| 187741 | cagggtttct aattctgatt ctagctaaat cctcctgatt taagctagga ggattgtatc |
| 187801 | tttgcaggaa tttattcatc tcttctaggt tttctagttt atgtgcataa aggtgttcat |
| 187861 | agtagccttg agtgatcttt tgtatttctg tggtgttggc tgtaatatct cctatttcat |
| 187921 | gtctaataga gcttatttgg atcttctctc ttctttgctt cattaatctt gctaatcgtc |
| 187981 | tatcaatttt atttatcttt tcgaagaacc agctttttgt tcaatttatc ttttgtattt |
| 188041 | ttgttgttgt ttcaatttca tttagttctg ctctgatctt tgttatttct tttcttctac |
| 188101 | tatttgggtt tggtttgttt ttctagttcc ttgaggtgtt accttaggtt gtctatttgt |
| 188161 | gctctttcag actttttggt gtaggcattt aatgctatga acttttagca ccacctttga |
| 188221 | tgtatcccag cagttttgat aggttgtgtc actattattg ttcagttcaa agaatttttt |
| 188281 | catttccatc ttgatttcat tgttgaccca acaatcattc aggagcatgt actttaattt |
| 188341 | ccatgtattt gcatggattg gaggatttct tttgatttcc aattttattc cactgtggtc |
| 188401 | taagagagta cttgatacaa tttcagtttt cttaaattta ttgaaacttg ttttctggcc |
| 188461 | tgtcatatgg tttatcttgg agaaagttcc atgcactgat gaatggaatg tatactctgt |
| 188521 | ggttgttggg tagaatattc tgtaaatatc tgttgggtcc atttgttcta ggtatagttt |
| 188581 | taatccattg tttctttgtt gactttctgt cttgatgacc tgtctagtgc tgtcagtgga |
| 188641 | gtattgaagt cccccactat tattgtgttg ctgtctatct catttctgag gtctagtagt |
| 188701 | aattgtttta taaatttggg agctccagtg ttaggtgcat atttatttag gattatgttt |
| 188761 | tcctgttgaa caaagccttt tatcatgatt tagtgtccct ctttgtattt tttaactgct |
| 188821 | gttgctttaa agtttgtttt gtctgatata agaatagcta ctcctggtca cttttggtgt |
| 188881 | ccatttgcat ggaatgtaat tttccaccct tttacctcaa ctttatgtga gtccttatgt |
| 188941 | gttagttgag tctcttgaag acagcagata cttagttggt gaatactttt tttttaaatt |
| 189001 | atactttaca ttctggggta catgtgtgga atgtgcaggt ttgttacata ggtatacaca |
| 189061 | tgccatggtg gtttgctgca cctgtcaacc cgtcatccac attgggtatt tctcctaatg |
| 189121 | ctgtccctcc cttagctccg catccccaaa caggccacag tgtgtgtaca tgtgttctca |
| 189181 | ttgttcaact cccacttatg agtgagaaca tgtggtgttt agttttctgt tcttgtgtta |
| 189241 | gtttgctgag aatgatggtt ttcagcttca tccgtgtccc tgcaaaagac attaactcat |
| 189301 | ccttttttat ggctgcatag tattccatgg tgtatatgtg ccacattttc tttatctagt |
| 189361 | ctatcattga tgggcatttg ggttggttcc aagtctttgc tattatgaat agtgctgcag |
| 189421 | taaacatacg tgtgcatgtg tctttacagt aaaatgattt ataatccttt gggtatatac |
| 189481 | ccagtaatgg gatggctggg tcaaatggta tttctagttt cagatccttg aggaattgcc |
| 189541 | acactgtctt ccacaatggt tgaactgctt tagactccca ccaacagtgt aaaagcattc |
| 189601 | ctatttctcc acatcctctc cagcacctgt tgtttcctga ctttttaatg atcaccattc |
| 189661 | taactggcgt gagatggtat ctcattgtgg ttttgatttg catttctcta ataaccagtg |
| 189721 | atgatgagcc tttttttcat atgttggttg gctgaataaa tgtcttcttt tgagaaatgt |
| 189781 | ctgttcatgt cctttgccca ctttttgatg gggttgtttg atatttcttg taaatttgtt |
| 189841 | taagttcttt gtagattctg gatattagcc ctttgtcaga tggatagatt gcaaatattt |
| 189901 | tctcccattc tgtagattgc ctgtccaatc tgataatagt ttcttttcct gtgcagaagc |
| 189961 | tcttcagtgt aattagatcc catttgtaaa ttttggcttt tgttgccatt gcttttggtg |
| 190021 | ttttagtcat gaagtctttg cccatgccta tgtcctgaat ggtattgcct aggttttctt |
| 190081 | ctagggtttt tacggtttta ggttttaggt ttaagtcttt aatacatctt gagttaattt |
| 190141 | ttgtataagg tgtaaggaag gaatccagtt tcagctttct gcatatggct agccagtttt |
| 190201 | cccaacacca tttattgaat agggaatcct ttccccattg tttgtttttg tcaggtttgt |
| 190261 | caaagatcag atggttgtag atgtatggcg ttatttctga ggcctctgtt ctgttccatt |
| 190321 | ggcctatata tctgttttgg taccagtacc atgcbgtttt tgctactgta gccttgtagt |
| 190381 | ataagtttga atcaggtagt gtgatgcctc cagctttgtt ctttatgctt aggattgtct |
| 190441 | tggctatgca ggatattttt tggttccata tgaaatgtaa agtagttttt ttcaagtctg |
| 190501 | tgaagaaagt caatggtagt ttgatgggga tagcattgaa cctacaaatt actttgggca |
| 190561 | gtatagccat tttcacgata ttgattcttc ctatccatga acatggaatg tttttccatg |
| 190621 | tttgtgtcct ctcttatttc cttgagcagt ggtttgtagt tctccttgaa gaggtccttc |
| 190681 | acatcccttg taagttagat tcctaggtat tttattcact ttgtagcaat tgtgaatggg |
| 190741 | agttcactca tgatttggct ctctgtttat ctgtttttga tgtataggaa tacttgtgat |
| 190801 | ttttgtacat tgattttgta tcctgagact ttgttgaagt tgctaatcag cttaaggaga |
| 190861 | ttttgggctg agacaatggg gttttctaaa tatataatca tgtcatctgc aaacagagac |
| 190921 | aatgtgactt cctcttttcc taactgaata ccctttattc ctttctcttg cctgattgcc |
| 190981 | ctggccagaa cttccaatac tatgttgaat aggagtggtg agagaagaca tccttgtctt |
| 191041 | atgcbggttt tcaaagggaa tgcttatgct tccagttttt gcccattcag tatgatattg |
| 191101 | gctgtggatt tgtcataaat agctcttatt attttgagat acattccttc aatacctagt |
| 191161 | ttattgagag tttttagcat gaagggctgt tgaattttgt tgaaggcctt ttctgcatct |
| 191221 | attgagataa tcatgtggtt tttgtgattg gttctgttta tgtgatggat tacatttatt |
| 191281 | gattcgcata tgttgaacca gccttgcatc cccaggatga agccagcttg atcatgttgg |
| 191341 | ataagctttt tgatatgcta ctggattcag tttgccagta ttttattgaa gatctttgca |
| 191401 | ttgatgttca tcagggatat tggcctgaaa ttttcttttt ttgttgtgtc tctgccaggt |
| 191461 | tttgctatta ggatgatgct ggcctcataa aataagttaa ggaggattcc ctctttttat |
| 191521 | attgtttgga atagtttcag aaggaatgat accagatcct tttagtactt ctggtggaat |
| 191581 | tcatctgtga atttgtctgg tcctggactt tttggttggt aggctattaa ttgctgcctc |
| 191641 | aatttcagaa cttgttattg gtctagtcag ggattcaact tcttcctggt tcagttttag |
| 191701 | gagggtgtat gtggctagaa acttatccat ttcttctaga ttttctagtt tatttgcata |
| 191761 | gaggtattta tagtattctc tgatggtagt ttgtatttct gtgggatcgg cggtgatata |
| 191821 | ccctttatca ttttttattg catctacttg atttttctct cttttcttct ttattagtct |
| 191881 | ggctagttgt tgatctttca aaaaagccag ctcctggatt cattgatttt tttttttttt |
| 191941 | gaagggcttt ttgtatctct gtctccttca gttctgctct gctcttagtt acttcttgcc |
| 192001 | ttctgttagc ttttaaattt ttttgctctt gcttctctag ttcttttaat tgtgatttta |
| 192061 | gggtgtcgat tttagatctt tctttctttc tcttgtgggc ttttagtgct ataaatttcc |
| 192121 | ctcaacatac tgctttcaat gtgtcccaga gattctggta cattgtttct ttgttctcat |
| 192181 | tggcttcaaa gaacatcttt atttgtgcct taatttcatt atttacccag tagtcattta |
| 192241 | ggaacaggtt gttcagtttc gatgtagttg tgaagttttg agtgagtttc ttaatcctga |
| 192301 | gttctaattt gattgcactg tggtctgaga gactgttatg atttccattc ttttgcattt |
| 192361 | gctgaggagt gttttacttc caattacgtg gtcaatttta gaataagtgc gatgtggtgc |
| 192421 | tgagaagagt gtatattctg tttatttcgg gtggagagtt ctttagatat ccattaggtc |
| 192481 | tgcttggccc agagctaagt ttaagtcctg gatatccttg ttaattttct gtctcgttga |
| 192541 | tctgtctaat attgacagtg gggtgttaaa gtctcatgct attattgtgt gagggtctaa |
| 192601 | gcctctttgt aggtctctaa ggacttgctt tatgaatctg ggtgctcctg tattgggtgc |
| 192661 | atatatattt aggatagtta gctcttcttg ttgcattgat ccctttacca ttatgtaatg |
| 192721 | ctcttctttg tctttttttg atgtttgttg gtttaaagtc tgttttgtcg gagactagga |
| 192781 | ttggaacctc tgcttttttt tgcbgtccat ttgcttggta aatattcctc catcccttta |
| 192841 | ttttgagcct atgtgtgtct ttgcacgtca gatgggtctc ctgaatacag cacaccaatg |
| 192901 | ggtcttgact cttaatccaa tttgccagtc tgtgtctttt aattggggca tttggcccat |
| 192961 | ttacatttaa ggttaatatt gttatgtgtg atttgatcct gccattatga tgctggatgg |
| 193021 | ttattttgct cattagttga tgcgatttct tcatagcgtt gatggtcttt acaatttagt |
| 193081 | atgtttttgc agcggcbggt actagttgtt cctttccatg tttagtgctt ccttcatgag |
| 193141 | ctcttgtaag gcaggcctgg tggtgacaaa atctctcagc atttccttgt ctgtaaagga |
| 193201 | ttttatttct ccttcactta tgaagcttag tttggctgga tatgaaattc tgggttgaaa |
| 193261 | attattttct ttaagaatgt tgaatattgg cactgtcttc tggcttgtag ggtttctgca |
| 193321 | gagagatcta ctgttagtct gatgggcttc cctttgtggg taacccaacc tttctctctg |
| 193381 | gctgccctta atattttttc tttcatttca accttggtaa atctgatgat tacatgtatt |
| 193441 | ggggttgctc ttcttgagca gtatctttgt ggtgttctct gtatttcctg aatttgaatg |
| 193501 | ttggcttgcc ttgctagctt ggggaagttc tcctggataa tatcctgaag aatgttttcc |
| 193561 | aacttggttc cattctcccc atcactttca ggtacaccaa tcaaacatag atttggtctt |
| 193621 | ttcacatgat cccatatttc ctggaggttt tgttcatttc ttttcactgt tttttatcta |
| 193681 | atcttgtctt cttgctttat atcattgaat tgatctccaa tctctgatag cctttcttct |
| 193741 | gcttgatcga ttcggctatt catactcgtg tatgtttcat gaagttctcg tgctgtgttt |
| 193801 | ttcagctcca tcaggtcatt tatgtcctct aaactggtta tttcagttag caatttgtct |
| 193861 | aacctttttt caaggttctt agcttctttt cattgggtta gaacatggtc ctttagctcg |
| 193921 | gaggagtttg ttattaccca ccttctaaag cctacttctg tcaattcgtc aaactcattc |
| 193981 | tccatccagt tttgttcgct tgctggcaag gagttgtgat cctttggagg agaagaggca |
| 194041 | ttctggtttt tggaatgttc agccttttcg cactggtttc tccccatctt cgtggattta |
| 194101 | tctacctttg gtctttgaag ttggtgacct tcggcbgggg tctctgagtg gtcctttttg |
| 194161 | ttgatgttga tactattcct ttctgtttgt tagttttcct tctaaccatc aggcccctct |
| 194221 | gctgcaggtc tgctggagtt tgctggaggt ccactccaga ccctgttcac ttgggtatca |
| 194281 | ccggcagagg ctgcagaaca gcaaagattg ctacctgttc cttcctctga aagctttgtc |
| 194341 | ccagagggac atccaccaga taccagccag agctctcctg tatgaggtgt ctgtcagccc |
| 194401 | ctactgggag gtgtttccca gtcagtatac ctgggggtga gggactcact tgaggagtca |
| 194461 | ctgtgtccct tatcagagct ggaacccagt gttgggaaat ctgctgctct cttcagagct |
| 194521 | gccacacagg gcbgtttaag tctgctgagg ttgcacccac aaactcccct tcccccaggt |
| 194581 | gctctgtccc aggaaggtgg gggttttacc tatgagtccc tgactggggc tgctggcttt |
| 194641 | ttttcagaga tgccctggcc acagaggagg gaatctagag aggcagtttg ggtgcagtgt |
| 194701 | ccttactgag ctgtggtgag cttcgtccag tttgaacttc ctggcaactt tgtgtacact |
| 194761 | gtgagggtaa aaccccctac tcaagcctca gcaatggcag acgtccctcc ccccaccaag |
| 194821 | ctcgagcatg ccagatcgag ctcagattgc tgtgctggca gcgagaattt caagccagtg |
| 194881 | gatcttagct tgctgggctc cgtgggagtg ggacccactg agccagacca cttggctccc |
| 194941 | tggcttcagc cccctttcca ggggcgtgaa tggttctgtc tcactgacat tccaggcacc |
| 195001 | actggggtat gaaaaaacaa ctcctgcggc tagctctgtg tctgcccaaa cggcagccca |
| 195061 | gttttgtgtt ggaaacccag caccagggcc ctggtggcgt gggaactgga gggaatctcc |
| 195121 | tggtctgcag gttgtgaaga ccatgggaaa agtgcagtat ctgggccggt gtatgtggta |
| 195181 | cagtccatag tggcttccct tggctaggag agggagttcc ctgatccctt gcacttcctg |
| 195241 | ggtgaggcaa cgccccaccc tactttggct tgccctcctt gggctgcatc cactgtccaa |
| 195301 | ccagtcccaa tgaaatgaac tgggtacctc agttggaaat gcagaaatca cccaccttct |
| 195361 | gcatcgatct tgctgagagc tgcagactgg agcbgttctt gttttgccat cttgccagca |
| 195421 | aatcggtgaa ttgttatgta ttctgcaatt ctatatcttt taagtggagc atttaggcca |
| 195481 | tctgcattca atgttagtat tgagatgtga ggtactattc tattcatcat actatctgtt |
| 195541 | gcctgaatac cttggttttt tatttattta cttatttatt gtatttttgt tttaatgggt |
| 195601 | cttgtgagac tcatgattta gagattctgt tttgatgtgt ttccatggtt cgtttcaata |
| 195661 | tttagagctc ctttcagcag ttcttatagt gctggcttgg tagtggcaaa ttctcttggc |
| 195721 | ctttgtctga aaaagactgt atctttcctt catttatgaa gcttaggata caaaactgtt |
| 195781 | ggctgataat tgttttgttt aaggaggata aaaataggac cccagtcccc tctagcctgt |
| 195841 | agggtttctg ctgagaaatc tgctgttact ctgatagatt ttcctttata ggctacctgg |
| 195901 | tgcttttgcc tcacagctct taagattttt ccctctgtct tgactttaga taacctgata |
| 195961 | actataggtt taggcaatga tctttttgca atgaatttcc caggtgttcg ttgaacttct |
| 196021 | tgtatttgga tgtctacatc tccagcaagg ctgaggaagt tttcctctat tattccccca |
| 196081 | aatatgtttt ccaaacttag atttctcttc ttccttaggg actccactta ttcttaggtt |
| 196141 | tggtcattta acataatccc aaacttcttg gaggctttat tcatttttta aaattctttt |
| 196201 | actttccagt acattttgca tttctctgtg ttctttactt cctgaagtag tgattgtttt |
| 196261 | atatttatgc tatctatttc actgaagatt tctcccctca tatcttgtat catatttttt |
| 196321 | tatttcctta agttggactt cacctttttc tggtgcctcc ttgattagct tactactcga |
| 196381 | ccttctgaat ttttttttct ggcaattcag ggatttcata ttggtttgga tccattgctg |
| 196441 | gtgagctatt gtgatttttt gatgatgtta aagaacatta ttttgtcata ttaccagaac |
| 196501 | tgtgtttctg gctccttctt atttgggtag gctatttcag aggaaagatc tgaagctcaa |
| 196561 | ggctgctgtt cagattcttt tgtcccatgg ggtgttccct tgatgtagta ctctccccct |
| 196621 | tttcttagga atgtggcttc ctgagagcca aactgtagtg attgttattt gtcttttgga |
| 196681 | tctagccacc cagtggagct actggtctct gggctggcac tgggggatgt ctgcacagag |
| 196741 | tcctgtgatg tgaaccatct ttaggtctct cagctgtgga taccagcatc tggtccagtg |
| 196801 | gaggtggcag aggagtaaaa cagactctgt gaggtgcctt agttgtagtt gtttaatgca |
| 196861 | ctagttttgt gctagttggc ctcctgccag gaggtggcgc tttcaagagt acgtcagctg |
| 196921 | tggtagtata ggggaggatc aggtggtggg tgggggccct agaactccca agaaaatatg |
| 196981 | aactttgtct ttagctacca gggtgggtag ggaaggacca tcaggtggga gcagggttag |
| 197041 | gtacgaatga cctcagactc tccttgtgtg gggcttgctg tggctgctgt ggggataggg |
| 197101 | gtgtggttct caggtcaatg gagttatgtt cccaggagga ttatggctgc ctctgctgtg |
| 197161 | tcatgcaggt tgtcaggaaa gtggagaaag ctgatagcct cacccagctc ccatgcaacc |
| 197221 | caaaaggctg gtctcattcc cactgtgccc cctccaacag cactgagatt gttttcaggc |
| 197281 | agtgggcaag tagggctgag aacttgcccc aggttaccag cctcctggtt gagaaagcaa |
| 197341 | gcggggcttt tgtgccacct ccctgcctgt caccggattc acatcctccc ccaagttctg |
| 197401 | gccaggaaac ttcacatttg gttggaatcg ttacagagtt cagctggagg tttccttctc |
| 197461 | cctgtggtct tttcccagtt cctctggcag ccctcctcaa ggactcctgt gagacaagtc |
| 197521 | agaaattgct tctctgggga cccggagaac ccacatggct tttcctgtgg cttcttctac |
| 197581 | ccttgtgttt cactcagctc tctaaattgt ctcagctcca ggtaaggtca aatctttctc |
| 197641 | ttgtgatctg gacctttagg ttccccagtg agtgtgtata ttcggggcag gggatgatct |
| 197701 | ccctttccca cttttgcagt ttgggcactc acagtatttg ggctgtctcc caagtcctgc |
| 197761 | aggagcaacc tgtttccttc aaatggtctg tggattctct tgactttccc agtatatttc |
| 197821 | tgcagcagtt cttggaacaa aagttcacaa tgcaagtctc cacattctat tctatccatc |
| 197881 | caagtggggg ctgcaattta gtcctgactc ctatctgcca ttttttccta gcagttcatt |
| 197941 | ctggattatt tttaaccaat aactcaacca aagcacaggc cttcagttct tgtactttac |
| 198001 | aggtatcttg agtatagcaa tttttcatct gcagaatgga gagtatatag gcaattaatg |
| 198061 | catctagatt ttgtccatca aaaggtaaca ttgacatccc atttttctgc tattttataa |
| 198121 | gttcatacca ggtgtcaagc attatgctgt gggcaagttt cttagtctct acatccttga |
| 198181 | gtctccttac tatgaatgga gataaaagta ctactgcata aagttattga gataattaaa |
| 198241 | taagctcata gatacaagca tgtaacatgg tacctagcat aataattttc tttatccctc |
| 198301 | ttaaccctcc ttcaaggtag gttttactat tttgacttta catataagga aactgaaact |
| 198361 | ctgagaggat aaataattgt cagacaatta ataagtgata gatccacaat ttaagcttgt |
| 198421 | tgtgtggaaa cttaccttgg tatgatggag gtctctaagt acactaccaa gcaagctctc |
| 198481 | ccagaagtca caaacctgaa gttcacatac caaattaaaa tgctcaaatc acatggctta |
| 198541 | gtaagcttat ttaaagcaca gtgagaagta aggggaaaga gatgggttat ggtaagacat |
| 198601 | gggataaagt agcaatatcg tgagatcatg ggcaacagga ccacacttct gtatcctgtg |
| 198661 | ttctgcagtg ttcgtgtgcc ctgtctctct catcctgctg atagtgtggc taaggggact |
| 198721 | gaggtcccaa tgggggccac ataataaaga ttacttgggc caatgatagg tacaagctcc |
| 198781 | attggaatga atgacacagg acaagtacgc ctgatcatag cagtagcttg tgattagcct |
| 198841 | gctgaaattg caggagttgt gtctgcattt cttggacaga gcagatgcaa gaggaacaaa |
| 198901 | ctggatgaca ccaatggctg gtcaagttag cagtgacagg tatctcagtc ccaaagtgtc |
| 198961 | aggataatga tttggtcttt tcatctcttt ctaactgtaa tgttcttgtt tgttcatcat |
| 199021 | atatattttt aaaaatttat tttctgtctt tctttggcag atattacagg ttactaattt |
| 199081 | acctgctatc tgtagtgaac acatcaaaca tgcctatgca tcatatgtac atgtttactt |
| 199141 | attagctata tttaacatat cctatgtgca ggaccagcta cataatttgc atgatgtaat |
| 199201 | gtaaaatgca aatggggggc cccttgttaa aaaatactta agaatttcta ttattaagaa |
| 199261 | ttttaagatg atgaaagaaa ccagaatatg ccagctctaa atatgcctca ttgacgtaaa |
| 199321 | tatttttgag ctgaagggaa ttaagaagca catgcagaaa agctctctgc ctcttctatt |
| 199381 | tgcctaaaag caggacagag aattacaaaa acaaaaggtc ttttatgttc ctcctcccct |
| 199441 | ttcctgccta aagacaagat gtaaattctc ctttacaacc tttaccagct gagagcctgc |
| 199501 | ttcagaaaaa tctgggaaca gacttgactc tttcccacag ttctctggcc tttggaagct |
| 199561 | tagggcbgtt ttcctctttg tcctgtcact tctctacaat gtattgatct tgttgaatac |
| 199621 | tttgtattag ctgggattct aagccacact gccttgagtt acttttcacc tgcgtgatgt |
| 199681 | tcatgtatta atagacttgt ttgtttttct cttgttaatc tgtcatttgt tacaggagac |
| 199741 | tgtctcaatt aaaaacttac gagggttcag aaaaattata atttcttccc aacaatgaca |
| 199801 | atagcagagc ataaaactaa gcacagggcc catgtgagta tggggtcctg taacagtgca |
| 199861 | ggtcacaggc ctatgaaatt gcccctgcct atgaatttca cctgactatt ccaagccaag |
| 199921 | agctacttat tatctatgct gaacatttct aatgatttcc atcttttcca atagcagaat |
| 199981 | tcagtggtct caaataattc agccaactca cattatagaa ctcaagtcta tgtaactcca |
| 200041 | agtcactgtt catgcactat agtcatggag ttctttttaa atacctgtca tccccatgtt |
| 200101 | caaacccttc aatgtctccc tagtaattaa caaaatttag tcaattttgc ctaaaaaata |
| 200161 | tcggtgagct ccacaacctg aattccaact tactttccaa agcaaactct cattaattac |
| 200221 | tgatgatgac catgaggttt tggagaggga caaaaccatc tccaaatgtt tttgagtgtc |
| 200281 | tcctgtgtat cgtgtcctgt actagatgtt ttacacatca actcatttaa tccttatgag |
| 200341 | aacattgaaa acaaagttat ccccatttta cagatgagaa aattgagatt gatagaggta |
| 200401 | aggtcacctt acacagttat taactgtgag ggtggattaa aatccagatt tctctgtctc |
| 200461 | taaaacctca ggctttttct actgtgccat actacttcta atttgaactg tattttccag |
| 200521 | tgaaatgaga ttaatcttcc ctatagacat gccaggtacc tgttatcact ttattctggt |
| 200581 | atccgctcca ttttttggca tcctatgctt cttccatgcc tgactttatc tcccgtttga |
| 200641 | gcctctttct ctgccaacgc ccatagaaat aaaattcaaa tgaattctct tgattattca |
| 200701 | tttggctctt ctgttaggca gcattgtgtt gcatttttaa aaattatatg taaatctcca |
| 200761 | tttcagaaga gattttgagc tcctcagggc acgaaacgta tcacatagct ctttattgtc |
| 200821 | tcaagtacta gcatagtgct ttgtatgcaa tatttaatta atattttctg tgtgggtgaa |
| 200881 | aatgttaatg tcttttttgt tggacattca tttccaaagc agaacaatta acatgactgg |
| 200941 | atgtttaaag ggtctggatg aataggtgag tgaaggacag aaatgtgctg gtaaaaagcc |
| 201001 | ctgatctata gtgcttgcca atttccgtgg tgtaaatact tccactatag ccaattttaa |
| 201061 | gctaccaaca gttagagcca actcacaaaa ttcttgaaaa tttcataatc agtggttttg |
| 201121 | tgtgagccag cataagtcag cttcggtatc tctttgaggg atttaataat gaactcaact |
| 201181 | aaggtaaaac tgatctggaa caactgaaag cagaggttaa agtaaaataa ctctgttatt |
| 201241 | taatctataa tcaactatga aatgcttgaa ttagagctgc ctgtgagaag gaaaaacaat |
| 201301 | gattccataa tgtgaaggct ccagacaaag gccaaaagtg catcaatgac ttcttatccc |
| 201361 | agttttttaa actaaaaaaa ctgctagcta aatgattttt gttttatatg acttttgttt |
| 201421 | tatatgactt ttgtttatat gactttcctc ccaaatctgt tagcatgcat agagtttcag |
| 201481 | tttttctttc atcttctcct cttctgctca tttctctctt tttaaatttt atcataaagt |
| 201541 | ggaacacttt ttattcaaga gaaatcaatt cttgattgag atcagaaatc tcttgccatt |
| 201601 | cacattagag ttgatctacc acaattgcct gcttcatcat tttcattcta ttggaataag |
| 201661 | tatttacagc tataaactat cctgcatctt acatatttct attaaacaag aacaatgtcc |
| 201721 | gtgacagttt tctgtctcag gatttatctt attaatattt attgtattgt tatgagtgct |
| 201781 | tagcaaatta ttgtggttaa ctttaccaat gcctttcaaa taatattttg aaattttccc |
| 201841 | tgaaaggata ttgagaaaag ccaaatgtaa aaattattgt tttttttcct tgggatttgc |
| 201901 | atgttttgaa aacgttctca attgttaggg aagtcagctg taaaacacag gctaaatata |
| 201961 | cttttgtcta ccaagaattc cctttacttg tctgtttcgt gatttgttta atctttctta |
| 202021 | gttatgcatg taccatttta ccatagttac ctggagatat tcttgtctct gccttagttt |
| 202081 | ggcaggcttt tcaagtggct cactgagcta ctgtttctat ttcttttaga aagttgtgga |
| 202141 | ggcatttatt actctcataa ctgcctcaaa atctcaagca catggcctag ttaaatcatc |
| 202201 | ttgaggttct gcccatatgg ttgcagaagg atattagtca ttggaaaaaa tgggtctaaa |
| 202261 | atgataatat tcaaagatgt tttccaatat tcttggcaat cttattcact aatttccacg |
| 202321 | gacatttaat tagcaagaat ttaaagaacc ttgttttagt ttcctgctgc tgtaatagaa |
| 202381 | tatcacagac tggataatat ataaagaaag gaaatttatt gggcttatgg ttctggaggc |
| 202441 | tgggaagtcc aagaggcatg acactggcac ctggcaaggg tcatccaatg gtggaaggca |
| 202501 | tcacatggtg agcaaggacg agagacaggg agaaatgggg ctgtatttat ctttttatca |
| 202561 | ggagcctact ctgtgatact agcccactct catggtaacc acattaatac attcatgagg |
| 202621 | atagagccct catggccgaa ttatctctta aaggtcccat ctcttactac tgttacaatg |
| 202681 | gcaattaagt ttccaataca taaactttag gagacatagt caaaccatag aaatcttaaa |
| 202741 | cttcaaataa acagggattt tttttagtag cacagtataa aatgataata ataaatatca |
| 202801 | gatataaaaa atttctgaag ttctttttag atagataaat catggttact attatcttct |
| 202861 | tagttacatt tcattgcacc ctattttctg tggtattatc agtcaacata ttatatatag |
| 202921 | taagacacat taaattttct gagcttgcca gggcatcctg tcccctaaca gtttttgata |
| 202981 | atgatttatc aaatgtgtac tctttagaat tttagcbgtc agtaacagtt gattttcaca |
| 203041 | acttttatta gactatccat gatgtttttt ggaaaggtag ttaaaaggat aaatacatta |
| 203101 | attatcataa aattatctag gaatgctttt aaatacattt gacataatac attaacacta |
| 203161 | aaaggaaagc aaatatgcac ctaataagca caaaataaga ttaatcagag aaatgtgtcc |
| 203221 | ttgctgtttt ggggaagagt tatccagatc tcaggtaagg tactttttgt ggagataacc |
| 203281 | ttctgtttta tgaagcttgt aacaagataa caatcaaggc atttttgtgg ccatgtttat |
| 203341 | gtatatgagc aagcaatggc aagtgagata ctagtttggg ggcttaaata agataaaagt |
| 203401 | agttaaactt tattaaaatg cacatattaa aataaatttt gaaatacatt gtattcaaat |
| 203461 | attgtattag ggttctctta gacaactcat aggatacccc cacacacaca ttttatgtgt |
| 203521 | gtatgtatat atatatatat atatatatat atatatatat atatatatgt atatacacac |
| 203581 | acacatgcgt acatatatat acaggagttt attaagtatt aacttacatg atcacaaggt |
| 203641 | tccacaacgg ctgtctgcaa gctgaggagc aaggagagcc agtcccaaaa tcaaaactga |
| 203701 | agaacttgga gtccgatatt cgagggcatg aagcatccag cacaggagaa agatgttgtc |
| 203761 | ggggaggcta ggccagtctc tcattttcag atttttctgc ttggtttata gtcactggca |
| 203821 | gctgattaga ttgtgcccac cagattaagg gtgcatctgc cttccccagc ccactgactc |
| 203881 | aaatgttaat ctctctctct ttttttttga gacggagtct ggctctgtcg cccaggctgg |
| 203941 | agtgcagtgg cacgatctcg gctaactgca agctctgcct cccgggttca agccattctc |
| 204001 | ctgcctcagc ctcccgagta cctgggacta caggtggccg ccaccatgcc cggctaattt |
| 204061 | tttgtatttt tagtagagac agggtttcac tgtgttagcc aggatggtct cgatctcctg |
| 204121 | acctcgtgat ccacccgcct cagcctccca aagtgctggg attacaggcg tgagccacca |
| 204181 | cgcccggcct caaatgttaa tctcttttgg cagtacccac acagacatgc ctaggattaa |
| 204241 | ttctttgtac ccctcaatcc aatcaagttg acactcagta ttaaccatca caaatatcat |
| 204301 | aacaaatcgt gtgaaaggag gaaaggggaa tagttttaca tttcaaatat aaggggtcca |
| 204361 | agattccctt ttatagttat aaaaattaga aatttttaaa tggtatgaat cacttatttc |
| 204421 | aaatagttgt atttatgatg cttttgtaat atatatgcat aagtttacct atatatttat |
| 204481 | atatgtgtgc atgtacatat aatgtataaa tacacaaagg cactcatatc tacataatga |
| 204541 | tacatgattc tttggatgaa ttaactttta cattttatgc atacactctt attgtgtttc |
| 204601 | ttgaccagtg cttggtcaca gggatcagga caagttagaa gggaggctat gggaggacac |
| 204661 | tgtaaaatat taacacaact taattctgca gaaaggccag ttcacatagg aagatggtgt |
| 204721 | cctctgaggg tgcacttacc caagctgtgt tccccaattg cttaggacag tcttccatgt |
| 204781 | ctaagtttgt catgtggcaa acaatcaaat ttacctggta gtcctagtga tttgcagagc |
| 204841 | tcactgaaat gccatcgttt aaaagcatca ttttaaattt attgtccact gatagatcaa |
| 204901 | aagatagaat accctattcc aagagaaaaa ctaaagactt ctattagaaa aatttaggtt |
| 204961 | tagcacttct aaatatcact atacaacatt ttgaaaaatg ttttgaaaaa acagttataa |
| 205021 | tgcttagaaa catttagaag aatataagca cacaggtatt gtgttgaaac acattaccta |
| 205081 | cactttcaat gcaggatgct tcttctcact atggggcagc actttgtgaa tttttctgtt |
| 205141 | tcacagtatt cagaattcat tagaacatgt ttgattagaa tgcacatgag gcaagcaaaa |
| 205201 | ttagcacagt ctgtctatca agccacgtag atggccttgc aaagagctga atgctagtat |
| 205261 | atctaagaat atgagattat atgtatgatt catggtggaa atgtctcctt tgttagataa |
| 205321 | attcctgcaa accaatgcct ggaatgccct ctctgcctac tcgaattcta ttagctcttt |
| 205381 | aacatccatt tgaattctta tctcatctac aatatcttca gcaactctga agcctccatt |
| 205441 | gtcctctccc ttttcacttc aaggcbgtct tgcattgtta tgtaactatt tcatgggcct |
| 205501 | agatctcatt tttcttaata aagtttaagc tgtagaaagg aattcatata tttccttgat |
| 205561 | ttcttttaaa cacttaacac attaagaaca taaaacatac ccagtaatta cttaaagaaa |
| 205621 | aaaaagacta agtaaaaggg acaatgaaag aataatagaa ataaaatgaa tttgtttatc |
| 205681 | agccagaatt ttgggtgggt cctcctcata gctatgtata gcaatctata atttcagtgc |
| 205741 | tatttctacc tacttctaat aaaaatattc ccacagtaaa ggggcaaggg gaaattccac |
| 205801 | cattttgcaa cattttggtg attagaattg ttgagatatg gttttagaca gagtttcctt |
| 205861 | cttattcttg ggctggtgat tttaagattc atttgtgtgt tttaggtcac attctcccca |
| 205921 | aatctcattt ttgctcaaca caagaacagt aagagtaagc tgggatgcct tagtgatatg |
| 205981 | gcctggaact ctgcagccta cataatacta tccctacctt caggtattag tgttgctaat |
| 206041 | aacatgctca actgattcat taaaacaaag gacaaaaaaa taaacaaaca taaaatcatt |
| 206101 | ttcatagagc ttaaagagac tatccagaga gacatttata aagttaccat tataaaatgc |
| 206161 | ttcacactaa aaaagaattc tttacaataa tttggttgta aattgtgtaa aattcttttt |
| 206221 | ccctccatca attttagatt tattggttgg agccttgtaa gtcagactga caaaagacag |
| 206281 | attaacaaga gaaaaacaag cagaagttta ttaccatgta tatccctctt attcatggga |
| 206341 | gatgagtaac tgaaagagga ggttagaact tgagctcaca tagcatctta acaaaagaac |
| 206401 | agtacatttt taaagaagtg acaagacaaa ggaaaaggac tttgagtttc taggatggca |
| 206461 | aatgatggga aagcaaatat atgggggaac taatggaaaa taaggactat ttagtaaagc |
| 206521 | ttgtcatgca gattcctctg gtgccctctc ttgactgata agtctggaat agtcttcagt |
| 206581 | gattaacttc tgtccttcca ggtaagaggg gaatgaaaat aataccttta tatatttatc |
| 206641 | tcctgctttt aggcaaaggg ggagagcaga gagcttttct tgtatctgct gcttcttgat |
| 206701 | tgctttcatc ttgaaataat ctttatacca tatttttggc acattttggc ataatatggc |
| 206761 | acataatcct gacatggcat attttggggt gccatattct gctaccctcc aaattgtctc |
| 206821 | tacccttcta ttatcttagc agataatagt acaacctccc aaattttggt ttccttctgt |
| 206881 | gaggaaaaca cagtttgtgc tgtgaccagt attgtagctc ctggggaaac ctgtgtggtc |
| 206941 | tcctctctct tctccctgct actgtaatac taacaaaaag aatgtttaaa ccataaattg |
| 207001 | aatcttaaag caatcaagta caaatcagag ttaggaaaag ttttaatcag caggtagaaa |
| 207061 | aaggatctag tgtgctttta tttttaaatt tttcattaat ccactaaagc ccagcttgtt |
| 207121 | atttttacct tgtttcatct aaaattaccc taagatgctg gcatgacctc tagggtgtga |
| 207181 | ctaaaatgtg tttgagtctt tatttgacat ttaagccagc catgaaaatt agcattggtt |
| 207241 | tagagctcca gggagcaaag aagtcatcct gagtctgaag aatttctgtg gctgtaactt |
| 207301 | ggaatttcat acaaatttga cctgtccaag acttgcttta attattcact aacaccagca |
| 207361 | tctggcttta acacatcttc atgagtatca tcagaactag agaaaaaaaa ttcccttaag |
| 207421 | aaatttttgt acataggtca ctctcatgtt tgttgctaat aaaaatttta gaggtcttag |
| 207481 | taatctaaaa aatatatatt ttacctgtaa agtggtacta tccaaaagga actataccaa |
| 207541 | aatacgtcag acataaaagt taagaggtta tgaaaatgta catgcaattc tctttttgct |
| 207601 | tgttcttagt ttatttactg cttgttttca gatagtcagg tagttactct ttagagatgt |
| 207661 | aaaataaagt atggacatga aaagtagtta tttaccaaag gcaattatca agtatcaaaa |
| 207721 | catgcagagt acttactgcc agttcaggga gacaacaaaa caattatata taatatagta |
| 207781 | gctttttagc ccaatcttcc aataattgct aggccaacat gctaaattta agagttcttt |
| 207841 | acctcttaaa tttagtagtc tcagtaaata aaatttgttt agttctgcag gggcagaaag |
| 207901 | atgtgatact ttgtccctat cataaggtca aggacaacac ttctctaatg aaagagggtt |
| 207961 | cacaagagaa aaacataaca catttcttta accaaagttt tatatgacat ggaagccttc |
| 208021 | agaatgaaga tttgaagacc caaggaaaaa ctgtccattt ttatgcttag attcaataaa |
| 208081 | gtgtgaacag ccatgtagaa gtgttattag acaaacaggg aattatctaa tagtaatgaa |
| 208141 | ctgagtgggg aaacccagca atacctgtcc agattcttct tggcctcact gttgtaacat |
| 208201 | ctcttcaccc tcctggctta tttggtatag ttccttttag acagtactac ttcatagata |
| 208261 | aaatatatat attttgatta caaagactac aatttttgtc agcaacaaac atgagagtgt |
| 208321 | ttcttcctcc cttgacctac tgttgaccaa gactaggtca tagaatttct ttatggccac |
| 208381 | cttctagaca gaaaggtaga gaaggttaga gtaataattc ttgtttttat ggccggcttt |
| 208441 | ggggaaaagg gggttttagt ttctacggcc tgccctgggg aaggggaatt ctgaattcta |
| 208501 | tggcbggttt tggggaagaa caaggggtga gaggtaggag agcaggagaa ggtcagagag |
| 208561 | accttggctc tgatgctgct actgaggcct tccagtgtcc tttagttcaa ggtgctcggc |
| 208621 | atgccaaagc agcacattca ggatatcatt ttctgagccc aacagttcca tattctgccc |
| 208681 | ccaacttgtt gcacattgga attgttcatg gacttacaaa aatattgatg ccatatccca |
| 208741 | gccctagaga ttgtgactta atttagctgt ccccaacctt tctgatacca gggaccagtg |
| 208801 | tcatggatga caatttttcc atatactggg gcbgggtgag gagatggttt caggatgatt |
| 208861 | caagtgcatt acatttattc tgcacattgt aatatataat gaaataatta tacaactcac |
| 208921 | cataatgtgg aatcagtggg agccctgagc ttgttttcct gcaactatac gatcccatct |
| 208981 | gggggtgatg ggacacagtg acagatcatc aggaattaga ttctcataag gagttcacaa |
| 209041 | cctagatctc tcgcatgtgc agttcacaat agggtttgca cccctatgaa aatctaatgt |
| 209101 | gactgctgat ctgacagcag gaggagctca ggtggtaata tgagttagca atgggtagtg |
| 209161 | gctgtaaata cagatgaagc ttcactcact cgcccaccac ttgcctgctg tgtggcctgg |
| 209221 | ttcctgacaa tcatctggtc ttctcactgg tattcatttg ttcaattagc atttgttgaa |
| 209281 | attcacatct atgccaggtg ctaaacccat atctgtgcca gtggccacga cctgacagtc |
| 209341 | atctggtctt ctcactgatg tccattcatt caattagcat atgttgaaat tcacatctat |
| 209401 | gccaggtgct atattaagta ctgggaaatt agtacaaaaa atatagacct tggagattcc |
| 209461 | agtgcaatgg taaaaatgga ctagaaagca acacactggg ataactactg cagaaaggtc |
| 209521 | agaggttaag tcacactacc tagggggtgg aggagattgt tggaaagaaa gaaaggatca |
| 209581 | ggaaaggttt tgtggagaag ctgtagtgtt ggcctaactc tagaactgaa gataaagaaa |
| 209641 | aggaagaaaa taggtgtagg agaagagaaa gggtatctta gagaaatgaa acagcatatg |
| 209701 | taaaagcctg gatgcattag aaatcaactt gcagccagcc tctcatctta tgttttctct |
| 209761 | aacttatctt gtatatcatt gttgaaacat ttttctcaca gcactgtatt acacccatca |
| 209821 | atttcctgct caaaaatact ctggatcctt actaataaca gaatgaattc tgcactgcag |
| 209881 | acgtgacatt agggcatgcc agatcctcct ctaaagcatt taaactgtcc tcttcattgt |
| 209941 | ctatctgaag accccaggta tgttttcatc tcttcatttt tgcttatatc attcccctgc |
| 210001 | accagaatgt ccctcctact cctttgacca tgtaactgaa tcctcccttt gttcagggtt |
| 210061 | ccttgatacc actccatctc tcatctcaat cttttagcat ttatgtttac ttttactatt |
| 210121 | cttgtttgtt ggtaattaga tggtgcccta aatatttatc tatatcttta ctttttaatg |
| 210181 | aaattgtaaa ttccttacag aaaagcatag gaccacattc ctttatctct ctttctgcat |
| 210241 | atggtacaat gccttaaaat aaacaaaatt tatttttatt actgataaca aaactgaatg |
| 210301 | acaataatat aatgagtttg gaaaatggag aaaccaagca tttgcataat tgcctagtct |
| 210361 | ttgatcattg atgcacacta cttttacata attataatga gagtatacaa attgttctgt |
| 210421 | attctgaaat tttacttgac attgtatcat caacatttgc tatgaaaaat aataaatatc |
| 210481 | agcbgggcaa ggtggctgac acctataatc ccagcacttt gagaggccaa ggtgggcgga |
| 210541 | tcacttgagg tcaggagttc gaaaacagcc tggccaaaag ggtgaaaccc tgtttctact |
| 210601 | aaaaatacac aaaaactagc tgggtgtagt ggcacaagcc tgtagtctta gctacttggg |
| 210661 | aggctgagac atgagaatct cttgaaccca ggaggcagag gttgatttga gccaagattg |
| 210721 | caccactgca ctccagcctg ggcagacaga gtgagtctct gtctcaaaaa aaaaaaaaaa |
| 210781 | aagataaata tctttggata ataactaaaa gcatcattta cctggtgtgc caggtactgc |
| 210841 | tttgcttaca ctgtttcaac ttttgtatgt atgtccttat tccaattcca tgaggtaaca |
| 210901 | ctggtgttat cctggggaaa ctgggagcac tgagctcaaa aagagtagag ctgtgctact |
| 210961 | tactaggtga ccttggatac ttattttact tagcgaatcc tcagtttcct tatctctgag |
| 211021 | atggggataa taatggttcc cacctttcaa gattttgagg ggatgaagtg agatgatgga |
| 211081 | cacgaatagt gcctggcaga tggccaacac tcagtgtgct ttagctcttg ctgccgtcac |
| 211141 | tgttgcbggt cccattttac aagtcaggaa actggatcaa aggcatttaa taactctccc |
| 211201 | caaatcacac acctggtgtg tgacagagcc aggattcaaa cccctgtccc aattatgaca |
| 211261 | tgagataggg atcacagaat ttaatacgat gttgtccaag tgtaacattt tacaatttag |
| 211321 | tgctacagag aacatgtgca gagttttgag agaaaacaca gttggatatc tacagattat |
| 211381 | cttctgcttg gagagaaaga gaaattgaga gagatagaga gagagagatt cccaggggcc |
| 211441 | cgagctctct acagcagcac agcatggctg ggtcagggct caggatagaa ttcctgactg |
| 211501 | cctcctccca ggcggtgtca taactggggc ttctgaagcc caacacctgg gccctctcct |
| 211561 | tgggtctcaa atggagggtt gaatcctctc atgctcactt actaacaaga acaattccca |
| 211621 | ctttcaatgg ggtaacagtc tgaggggaaa tgggctaggg ttttgcctgg aagtacctag |
| 211681 | ttatttctta actttgtagt ttggagattc agcataaaaa ctgaagtcag ccctgttagt |
| 211741 | agtattgctg cttatacagc cgtccaccct tatcagaggg gaataccttc caaggctccc |
| 211801 | cgtggattcc taaaaccaag gatactactg aacctgattg ctgtcaatca gaacatattc |
| 211861 | ctgtttatgt cttccaccac acatttaatg ccttttctat cttaactaac cacttatcac |
| 211921 | acactgtggc cataactttt gcagtttgaa gtacaacaga aaaactagca agaatttctt |
| 211981 | ttcccttctt cacaatttca ggaagagaag acgtcttacc atagatctta gcaacctcag |
| 212041 | catacttttt tttttctgcc ctcattaggt tgagaacttt cccttattca cttaaaggag |
| 212101 | gcactttgtg gcttctcttt ggcatatcca aattgccagc atcactaaac ttatgctttg |
| 212161 | ggggcattat taagtagaat aagggttact ggaacataag cattgtgata ctgtgacagt |
| 212221 | caatctgaga acccagaggg ctactaacag gaggagagtg cagactgtgt ggatttgctg |
| 212281 | aacaaaggga agattcactt cccaggctgg acagcacagg atggcatgag atttcatcat |
| 212341 | gctactcagg acagcacaca atttaaaact tatgaattgt ttatttctgg aattttccat |
| 212401 | taaatatttt tggactgcag ttgactactt gtaacaaact gtggaaggca aaactgcaga |
| 212461 | taagggggaa ctactgtaat agttactgct tatactgctc ttgctatttg ccatggacta |
| 212521 | agctaaacac attacataca ttattttcta taatggatgt gacaatccta cagagtagct |
| 212581 | actattatct ccattttaca gatgaagcaa ctgggcatct taaccattcc agctactgcc |
| 212641 | atcagcattt gccttaggaa aaaaatgtgt tttgaataat cacttccagt atttgggatg |
| 212701 | attttcaata attctaccag cctaactatg aagttatatt atctaggagg cctctagttc |
| 212761 | ttatttttaa tctttgtacc ttcgagtagc ttcttacctc tgtaactcac tcccacagta |
| 212821 | atatttcatg agaagccaga ttctctggac tattggttaa attcttttag atggcagtgt |
| 212881 | ttgttatgaa aagacttttc attcttctgg tcccttcact ggaaacagct agaaagtaca |
| 212941 | agttttgatt acagttgcct aaacaccagt tttgaaatgt ctttcatttg cttgagcaat |
| 213001 | aaatttgttg ctcaatcata ctatcaaatt gaaaacaaga ggaaaggaaa gtcaacctaa |
| 213061 | cctaacccaa aaggggaaca tgtttcctgg gatgagaatg tgtcaaaggc agcatagcat |
| 213121 | gacctaacac ttctgtgtaa tcgtggttgt atcatgtgtt atgggtaaat tatctattct |
| 213181 | gtaagttagt ccagtgtgtg cttcttcaac taactgtgaa agcattcttg aaagaccatg |
| 213241 | aaaccttatt attctaatta ccaacacaac ggattgataa atgaatgatg aggccaggta |
| 213301 | ttattgtcat taaatagacc tcgctcaatt atttatcaat gagtctgggg ttacagctca |
| 213361 | gagagctgtg catattgtag cacggtttgc ttcagctctg agacctgaag accagattac |
| 213421 | agtcttggca ggtggctttt gttgaatgca attcaagggg gtggtacaca tttgtttcag |
| 213481 | tcagacattt ggatggtttg aggccaacag atattcaaag tttatccaca aaagcctatt |
| 213541 | tcattttaac catgtagaaa aatctcttta atttattcag ataaatacaa atgagtagga |
| 213601 | gaatggatta gctgtagaaa atcatacatg taaagatgtt ttcttgcatc ttagtgttct |
| 213661 | aaagactgtt ctttattttc ttagattctg ctatctgtca tggacacttc actgttctgt |
| 213721 | attgatcaat gtttatcttc atatgagatt tgtttttgta tcttctttct aattgtacaa |
| 213781 | tgaaatatgt tttctggtta agaaatacgt tatcaaggag gatagaattg ggtgatacta |
| 213841 | gtttttttcc atcctgaaat catgccagct cattgcaaag gtcagccctc aaaatagtat |
| 213901 | taaggcatgc cctctccttg agtctctgat accttgcagc ccaatgtccc ttcttgaagg |
| 213961 | cctgtcacct gcaagagtac tttcttacat cctatgagca tcagatatgg gggaatgaag |
| 214021 | aatctcttct tgctaaacaa atattcttgg tccaccttct gccccctggc tttattttaa |
| 214081 | acccatcccc aacatatctg atgagttgag tctagtaatt ctgtcttcag tgggctatgg |
| 214141 | ggagcaggga ttagctaaaa tggcbgttca gggacctctt tggtataaaa cttggtgggg |
| 214201 | gtgctggcag ggatctctca gagaatgaag gaggggatag agcattagag aagaaaagaa |
| 214261 | attcatacct gagattatgt aatagataat agagtctgga ctttgtttaa aaaccagaat |
| 214321 | ctaagatata tatgttgagg ctagggcggg gtagtaattg aaagagaaat atgaaactat |
| 214381 | acctagcgtc aaggaaaact aacagtaatt gaagagacaa aaataaaact tgtttatatt |
| 214441 | gttcaaagga aaatgatatt tataacatct gacaaaaact ttattaatgc catgtagaca |
| 214501 | gggttttata ttattaactg agtttataat taattttgta ctgattttaa tttgactgtt |
| 214561 | accttggctt ccttctctgt ttcttaagtt ttgctagttt aatgttcacg agctcacaaa |
| 214621 | attaaaaatc ttggtagaaa tatggagtag ctatttcttt acatcctttt tagaacaaag |
| 214681 | ttgtgctttc gaattgacca cttatctaga aagtgatata aatctaataa gcaaaactgg |
| 214741 | atgtctttta aattatctgt taaataacta gagcagtgga gatgtcctga aagtgagcac |
| 214801 | tttattacat atgaaaaaca aattttaatt ttactactaa gaagaatttc catttctcta |
| 214861 | tttatatgtg ttcattattc tagagattaa tatgataact cctatgtata cttagttttg |
| 214921 | tgaatttcaa aattcttgat gccaaataac tgaagtatag taaattctgc cgtaacatga |
| 214981 | tgtatgggtt cctaaaaatc ccgacactat gcaaaattgg gcaataaaaa cacattttac |
| 215041 | taaaaaaatg gggataggca cacaatacct agaaatatca ctagtggcac attacaaaaa |
| 215101 | atatgggaat ttagtaacaa tgacagcaat attttacaca tgttaatggt taagaaattt |
| 215161 | acaataaata tggcagttta ctttgaaaaa gacctaacgt tccctgtgga agttggcctt |
| 215221 | caaaagggtg cagcttgtga gtttttgaga agtgttggga ggagagtcgt tgttgtccca |
| 215281 | gttgtgagca ggtggggctt ttctacctgt gtggggaagt gtggtagctg atggatatgg |
| 215341 | tatgtggatt ttgtgtattc ctacgctgct tggtttagct gggtgcagtt ttctgcattt |
| 215401 | acctggcgtt tcttgtggat agaatcacat ataagcaaat cccagacttg tgttgtgatc |
| 215461 | aaattgttcc gtaatatatc aatcatgtta gaacaaggtc acggtttcaa aaccggcatt |
| 215521 | gccgtagaat tgactgtgta ataatccctt caacacgttc acatctatga tcccaccttg |
| 215581 | ttcttgccac catcttagca agcaggggtg cgattgcctg accatttgtt tgttttctgg |
| 215641 | gaaatcttga cctattaaaa gccacacagt tactgaggaa acctgtgtca gaccttgcct |
| 215701 | aggtctgtgt gagtctgagt caggtttgct ttcctctgaa aaatcagaca ctcatgtatg |
| 215761 | tgggacaaag agcatcagaa acatgggcaa ggtcatagag acagatccca gagactggat |
| 215821 | tagaacccaa cttgcttgat tttctgctta gaggcttcag ttcaccattt tagaaagtgc |
| 215881 | ctgctggctg ccaccctccc tcctgtctta tcacctctaa aagacattgt taatgcttag |
| 215941 | acaggatgtg ttttcttcat tgcatggatc taaaaaccca gccatgagaa cttagttttt |
| 216001 | aatttttgcc attgctttat tggatatttt agaatgtgca aaaggtttta gaaattgttt |
| 216061 | ttcaactaat tttaccagca cagaggtcat gtcaaatgtc agggtgtttg acaacaaggc |
| 216121 | caatctagtc tatcaattga gtttcagaga agattaatga taaagggtgc aatcccaaag |
| 216181 | tctgggaatg actttgcttt caagcattaa ttattgtgga aaataaaatt attagatact |
| 216241 | cccttgtcta catctacccc aaactatgtc aatcagctct atttctagaa ggtttacatt |
| 216301 | tattaaacac tccctgtggt caatgcaatg gtcaatgcta tggaagttac aacaagacaa |
| 216361 | gatattgtgt ccgctatcag gaaactgatt tgggagttct gtttgatgac cgaagagagt |
| 216421 | ctttaccact gtgcctatat ttttatgcca gaatatgggt gggtgcacat gtacaggtga |
| 216481 | gtaatgaggc cccactccct agtattagtt aagttagcag gtgtgtgctg tttttttggt |
| 216541 | cactgtgtat tgcaaaattc tgagtttggc actgatacta aggaacatct tacagaaaaa |
| 216601 | attccccact gacccttctt ttttttttct ttttgaaaca gaatctcact ctgttgcccc |
| 216661 | aggctagaat gcagtggcac aatcacagct cactgcaacc tccgcctccc aggttcaagt |
| 216721 | gatcctcctg cctcagcttc cccagtagct gggactacag gtacacacca ccacgcctgg |
| 216781 | tcgatttttg tatttttagt agaggcaggg tttcaccatg ttggccaggg tggtctcgaa |
| 216841 | ctcctgacct caagtgatcc acccaccttg gcttcccaaa gtgctgggat tacaggtatg |
| 216901 | agccactgtg cctagccaga cccttcattt ttaaaagttg actttatatg ttaataggag |
| 216961 | tttaattata gtcatatgtt gaagggtctt ttctgtaaaa ccacatattc caggagccat |
| 217021 | ccaactgagg acagcattgc acttgtggaa ccacaatcca ggcttgggtt atctgtttct |
| 217081 | atcatgacag aggctactcc atcacttaaa ctatatgttc tgcagccccc gagagctgaa |
| 217141 | gacaagcctg gattgcctct atttgtaatt ttcttttttg taaatttttt tttggtaaat |
| 217201 | tgtttttcaa acaaacaaca aaaatgactg tcccagtcag ttcaagctga tagaacaaat |
| 217261 | ggccatagac cgggtggctt aaacaacagc catttatttc tcacagtgct agaggctgaa |
| 217321 | agtctaaaat cgaagtgcca gcatggtcgg gctctggcaa gggccttctc ccaggttgca |
| 217381 | gatggctggc tccttgtgtc ttcatgtagt ggaagcaggg ctagctagct ctctggccac |
| 217441 | tacttacaag ggcactaatt ccattcatga gggttctacc cccatggcca attacctcct |
| 217501 | aaatacccca cctccaaata ccatcatgtt ggagattaga tttcaacata cagattttga |
| 217561 | tagggacaaa aacattcagt ctataacaat gatcaaataa ggttacaaaa attatagtgt |
| 217621 | atgtagcatg cttgcattat gttttgatga attaatgttt tttattatgc ataccaaaga |
| 217681 | aactaatgca actgctgtaa atgtataaat atttgggagt aatgttaaag tttacattta |
| 217741 | aagccctttc taaatgtgag gccgaaagta ttccttttct ctctctttct cttctcaacc |
| 217801 | ccatttactt tacagaatga tttttctgtt ttaagtcata attgcttttt ttttacagga |
| 217861 | ttaagtacca ggtcattaag tgtgttctat gtcagtttga cctaacctct ctgccctttt |
| 217921 | cttttttcta aaggaattct ttaaaaagaa gaagaggaag tattttaaaa taaacatttg |
| 217981 | actgccagaa tgtgatgtaa acttcaggtt caattctaca cttgatagaa atgaaaagaa |
| 218041 | ctagtgttct ctattttgac atttagcatc aattcccttt cagtgattcc agctgattag |
| 218101 | taagtgagac taaaatatct tactcttcct ggtcagcatt taaaaattta aacatggatt |
| 218161 | gaaaatttct aggttatgaa atacagtcta ggttcacctg tgaaggatct agaagaaata |
| 218221 | agactgcaga cctggtaaat tcaaatgtcc actacttctg tattctagtc attgcaactc |
| 218281 | acctcctttt atcccttatg ttatttttat tttctcaggg aggcaaaaaa atttgtgagt |
| 218341 | gaaaatgaag gggctcttgg gaaaggaaaa ggaaaacggt ggtttgcatt taagatgatg |
| 218401 | atggccaagg taggtatttt tatagttgtc tggtttatgg catattgcct ctaagaagaa |
| 218461 | cactggttct tttctaaagg ggtgaaaaaa atcttacatt ttgtatatat aaaacacaaa |
| 218521 | tactcataca gtatatacac agtatatctg tggtattgaa atttacaggg gagatttaaa |
| 218581 | aaattgttct tagaagagtt aaaatgaaaa ataagtcaag aaatacagat ttatggcaaa |
| 218641 | agacttactt gtgtgacttt agcacttcca aatataaaag attgcatcct ttttcatttt |
| 218701 | cattctctgg aagtgaaggg gttctggtca agttgttttt ctcaaagtat ctgtatagtt |
| 218761 | tttttctacc aggaacatca actatacatt ggacagaaaa taagaaaaca ataaatgata |
| 218821 | tactgataca aatatagatt ttggggaaag acagaaaagc aactaacatt tatttaacac |
| 218881 | ttactatgtg ccaagcactg aattgaattc ttttataaag ttatatttaa ttcttacagt |
| 218941 | aaagtaggaa catagatatt attatctcct ctttacaaat gttataccaa ctgtaagcta |
| 219001 | aatgtattcc cataaagttt tgtgaataaa gttcatatat cctaactttc atatatatat |
| 219061 | atactcacat acaatagatt aattttgtct gtttctacag tttaaataaa ttgaatcata |
| 219121 | tagtatctat gcatttgttt ctggcttctt tgatgcaatg ttatgttcac aagatatatc |
| 219181 | cacgttgttg tgggagttat acttcatttt tattcatgtg ttgtagtcta ttgtataaag |
| 219241 | atgctgtgac aatgtattta cccattctat tgtagatgga catttgggct gtttctagtt |
| 219301 | atgagtaatc tttttttttt ttgttcattt ttaaaattaa ctcatacaca attacttgtc |
| 219361 | ttctggtttg ttgaaacaat aatgcagaca tttgctacaa caatgactgt taaaatggct |
| 219421 | ggccacaaaa tctccagcaa tacattaatc tgaagggcat tcttgatgaa gttgactaat |
| 219481 | tttgccattt tcatccacct tatagtattt caggacagcc agcttaacct tccttttctt |
| 219541 | atgcttattc ttctttggag tggtgtaaga cttcttcctt ttcttagcac caccatgaag |
| 219601 | tctcaacaca agatgaagag tagactcctt ttgaatgttg tacccagaca aagcacatcc |
| 219661 | atcttccagt ttcttgccaa caaagatcag tctttgctga tcagtagaaa ttcctgtctt |
| 219721 | atcctagatc ttggacttcg cattttctat tgtatccaag ggttcaaact ccagagtgat |
| 219781 | ggtctttccc ataagggttt ttaaagaaaa tctgtgtttt ggtggtggtt ccactgcaga |
| 219841 | aggcagatgg gaaaaaaagc gtgggtgatc ttttgaactt cagacttgtc tcatgctatt |
| 219901 | atttagacaa tagtgcctgt ccagctccca cttcatccca gcatttgcat acatgcaaaa |
| 219961 | ttctctgcca cattctcatt cttcctggtg gtcctcttga ctatggatga cccaacattg |
| 220021 | gagttaaata gaaagaaggc cttttgcaaa atgattttat gacttgttgt cttctctttc |
| 220081 | aattaagctg accaatctgc ctctaccaga atgcagtgtc tcatgtcata caacttacca |
| 220141 | tcttgtattg aactcaccta tttgtacaca gactatcctg gtagatcaga aggctttcaa |
| 220201 | gacaggacct ggaaataaaa gacagaaaat aaaatttatt ttgtttatta tttttattat |
| 220261 | ttattttatt taattattca tattgagtcc ttcatacaat gaaaactaat taaacacata |
| 220321 | ctctgttcca atcaccctat tatgtgctaa tcccctgctt tcttattgtg ttatataata |
| 220381 | aatagcbgtt tctgagaggc cagcatattt tccataaaac aggggatcga taaacatttt |
| 220441 | tttgttgaat taaattggtc tggggttagt ggagaacagg gaaacaagtg aaacctactg |
| 220501 | tttccccctt tgactagaaa gtagtatttg ctgccagaga gacatttcca agcttactgc |
| 220561 | attgtaatgt tttgaggtgg gggataaaca tcttgacaaa tcaagaggtt ggactttact |
| 220621 | tttgtatttg actttctttt cagaaatggg caaaattcct ccgtgatttt gagaacttca |
| 220681 | aagctgcgtg tgtcccatgg gaaaataaaa tcaaggctat tgaaagtaag tccttatcag |
| 220741 | atctcaggtg gagaaggttg tcttagagaa gtatctcata agcttatcag atgcctttgt |
| 220801 | cagtttctgg acttttggga agactagaaa caaacaaaca aacaaacaaa aaccaaatca |
| 220861 | acaaaaactt tgtttatgcc tgctttcgtc actgtgaaga tttgctagca cttaccaagg |
| 220921 | acaatactgg ggaccccact ctcgtgttct accttagtcc aaaacattac cattctaacc |
| 220981 | tggttttctc tcctatacag ggaagtcact attgtgcaca atgacattga atcatcttac |
| 221041 | ttggaaggca gagattttat tttggcaatg aacatgacat tgagaatata tactctcatg |
| 221101 | aatgttagac agtaatcaaa atgaacaatg ttttaacaag tgaagaagtc ttagtctggg |
| 221161 | cgcagtggtt cacgcctgta atcccagcac tttgggaggt tgaggtgtgc agatcacttg |
| 221221 | aggtcaggag ttcgagacca gcctggccag cgtggtgaat ccccgtctct actaaaagta |
| 221281 | caaaaggccg ggcgcggtgg ctcacgcctg taatcccagc actttgggag gccgaggcgg |
| 221341 | gcggatcacg aggtcaggag atcgagacca tcccggctaa aacggtgaaa ccccgtctct |
| 221401 | actaaaaata caaaaaatta gccgggcgta gtggcgggcg cctgtagtcc cagctacttg |
| 221461 | ggaggctgag gcaggagaat ggcgtgaacc caggaggcgg agcttgcagt gagccgagat |
| 221521 | cccgccactg cactccagcc tgggcgacag agcgagactc cgtctcacaa aaaaaaaaaa |
| 221581 | ataaaaaaaa taaaaaataa aaataaaagt acaaaaaatt agccaggcct ggtgcaaaag |
| 221641 | cctgtagtcc cagctactca ggaagctgaa gcaagagaat cacttgaacc cgagaggcgg |
| 221701 | aggttgcagt gagccgagat cacactactg cactccaacc tgggtgacac agccagactc |
| 221761 | tgtttcaaaa aaaaaaaaaa agaaagaaag aaagaaaaaa aacgaagtct taaaacctca |
| 221821 | ttttcaaatc tctgaagtag aataagcaat agtcatccag gagcttgcta tctgaatatt |
| 221881 | cacattgtgc ctttattttg tagaatattc ataggaagga aggaaggaag gaaggaagga |
| 221941 | gaatatagcc aatcaaaaac ctatttagtt tagtgcttta ggcttagaat aaggcaagta |
| 222001 | aacattttaa aatattgtaa ataaaaatag taaattgttt tttaaaataa taatctaaaa |
| 222061 | aaagggataa catttgaaac aattttgagc acaatctttc catattctgg tttctaacgg |
| 222121 | tttcaactag gatctgattt ccatccattc ctctctagat tggaggcagg ttttcctgct |
| 222181 | ggttaagtgt ggcgttgtat aattaaaatg gaggctccat agggagataa cacagctgat |
| 222241 | ggatagcttg ctgacatgat tgggcatgtt ttaggagtgg ctaaccctcg gttccctgtc |
| 222301 | tctcaatatc agatgggaat tattaagtgg caatgaatta aaatacatca gctcattaat |
| 222361 | tgtatcccct tccacacatt cccagtgcca tttctctctt gctttaattt cctccttaac |
| 222421 | acttaccgct atctaaaatg ctatatcttt aatttaattt tttgatgtaa tcttaattca |
| 222481 | ttttatgttc atttctccca atagatggga aatttagttt tgttcactcc tgcattccac |
| 222541 | ttggcactta ataaatatgt attgaataaa attacagaca aactcgctaa atgtctacca |
| 222601 | atctaggaaa aaaagaaagg aatttagata catcaaaaaa gagaagacat catggatttc |
| 222661 | ttaggtttca actgtacagc tcaaatgtgg taggttgaga ggcactgaaa aacaaaaggc |
| 222721 | catttggagc attacggtcc tgatacaata tatatagtaa gaactctgaa tttggtcttt |
| 222781 | gctttgctgc agattagctg tttgacttct agccagtcat ttaactcctc tggacctcag |
| 222841 | tctactaatt tataaaattg tagggctgag tcttgatcag ttgttagata aatcccaaga |
| 222901 | aatttgtaat taatgatagg taaatatata catttgaaaa ttatttttaa agcacactag |
| 222961 | agcaggttcc agcctatcct aatagtaata tcatgctcat ttgtgttcca ataggctata |
| 223021 | gccagtgaaa caaaaacaga cagaattatt tttattgcca gaaattgcat gcagcaagag |
| 223081 | ttacacatat gaccaccatc catcatgagt gtcacagtag aaaagacaga ttgagagcta |
| 223141 | tccaataata accttcagtt atctcctctc ttcttctctt cttctagtaa atttggaaag |
| 223201 | ccacgctgga aaattgaggc aaatgtagat tatttttctt tccatatata atttatgatt |
| 223261 | tgattagttt gtcatgactt cttcactgtt aatggtgctt tgtctcaact gtgaagaact |
| 223321 | gagctttatt ttttatttta tcaatattca ccacaccacc atttattgag taccaccatg |
| 223381 | agtcagatgc tctacaaaca ttgtttcatt taatcttcag tgttcctgca atgtgcacat |
| 223441 | taaccttcct attttatagt tgtgattaaa taactgtccc agaattagta gcagagctga |
| 223501 | aatataaggc aaaatctgtc tgggttcaaa acgtatgctt ttccatgtgt taggctgctt |
| 223561 | tctcctttag ggaaggtttt acatactttt tctttttaaa tatgttttgc accagttcat |
| 223621 | aaaaagtatt ctacgaggcc gatggcagga tgagtagtta tagattttct tgatcgttat |
| 223681 | caaggaatta tttttcattt tctcatgtat ttacttttta gtgagtgatt tatttaatta |
| 223741 | tatgttttgt attctatagg atgcttaatg tactgatttt aatgataacc atgaggcttt |
| 223801 | gggctatagt attagttgaa aaaatatgaa acctatgtaa gaatatatta ttagagcact |
| 223861 | ggattggact atcttataaa aagtacccta ctaaatatag gtaaagcatg tatctgtgat |
| 223921 | cacctttgaa actgaactta atgcaaaatg ggaagaaata ggacatgcaa tggattttct |
| 223981 | gagttgagga ctttttgacc cctaccacct ctgtagtttg gacaatctgt tgaaatctct |
| 224041 | ggttctgttt ccacatttgg ggctactaca atatctacaa catcttgggt ttaactagtc |
| 224101 | actatacaag atcatttcca gctcaacatt ctatgatgtg taagttacag tcagttttac |
| 224161 | atgtatatgt aggcatgtga aattcattaa tcatactttt gattgataaa tcctcaaaaa |
| 224221 | tttgaatgca aaacagattt atactaagag gggactatat aattgccttc tcaaattctt |
| 224281 | tttgaaataa agttggttaa gtgtgtaccc tacttataga atacatattt aattataaaa |
| 224341 | cggatataaa tgcttttctc ttaaataaat ggccatttaa tcttacaaaa ggttcagaag |
| 224401 | tatcattgta ttccatttcg acatcagaat catctaatat atatcttatt taatcctcag |
| 224461 | aataagcctg acattattga ttaactgagc aaatagtgga tgcctaacat gtttctaggc |
| 224521 | actattgcta ctgccaaaga cagcagagac tctaccctca ttgatcttac atccaaatgt |
| 224581 | gttaatgtat gtatgcttgg atggggaaga cagaatataa tataagcaaa taaataatga |
| 224641 | cggtaattgt ggattgtagt aagtggcatg gtcaaaagag gagcbgttgc cttccattcc |
| 224701 | caacagcctt tctaatccac ttttccccac tctctgctca gtatctagat aataccaaat |
| 224761 | aagtattttt aaaatgtggc taaaggagtc caaaattaac agcctttact gagttttccc |
| 224821 | aaagctctgt ccaataattt gcagaatcaa gagcgggacc caaattagag tctaaaattc |
| 224881 | atactgtttc catcttgatt ccagtaagac ctagatctct ttattagtgt gaagcggatt |
| 224941 | ctcacctgat gactcccaac tctgtttcac ttaaaaaata gatttgataa ttcctgccac |
| 225001 | agaggatact gtgacgttat gcatcacttg ggaatactgt ggggttttac tgtcacgtca |
| 225061 | gccttaaggg gatcatgcct aaaactcgat ggttgctcct gtggacacat cttattcatc |
| 225121 | tcattgaact gtgtattttt ctgaagcaac tgcatgtttg tacccccagg aaatataatc |
| 225181 | tatacccatt gtgatgccaa cattattatt aagaccataa attaaataat tgaatgtatt |
| 225241 | tctagcbggg gattacaaat ttttctcagg atcaaaatct actttttcct aatagtagat |
| 225301 | tgcatcatca aaattatagt ttcagaaacc tatttttttt cagacaggaa atagctttgg |
| 225361 | ataggcaagc caaagcacag ggcttaaacc ttatgtttcc ttgctgccct aaggattcta |
| 225421 | gaaaatacaa atcaaatttg tcacatttaa ttccctaccc ctaaatagtt cgaaaaaatt |
| 225481 | gtgcttcaca ttctagccta acatgatggt atttatattg tagtcacaca gcaggtcatt |
| 225541 | taattggtct tttcccattt agaaatactc atatttatct gcttgtctta ttacccatct |
| 225601 | attcaagagg aaatgatgtg ttatgacaga ctacaaatta ctttgcctta ataataaaca |
| 225661 | accagaaaga gagttgaaat tttaacttta atttgaaaga aacaagaata ttcaggaaca |
| 225721 | agaatatgct taagcataaa gcctcagttt aatacgtatc agagactctg ttttttggtt |
| 225781 | gttgttgttg tttgtttgtt tgtttgtttt ttgagacaga gtcttgctct gttgcccagg |
| 225841 | ctggagtgca gtggcgcaat ctcggctcac tgcaaacctc tgcctcctgg gttcaagtga |
| 225901 | ttctcctgac tcagcctcct gagtaggtgg gattacaggc tcctgccact atgcccagct |
| 225961 | aatttttgta tttttagtag agacggggtt tcaacatgtt gaccaggcag gtcttgaact |
| 226021 | cctgacctcg tgatccacct ggctcagcct cccaaagtgc tgggattaca ggagtgagcc |
| 226081 | accgtgcctg gctgagactc tgtttttata cattaataat ttactatgga agcagcattt |
| 226141 | atcagtctga ttaaagaaat aagaattggt cattatgggc atcaaatttg tgaatctgac |
| 226201 | tggctttagc tgattgatgg atattatcta tacctattgt ttcagaaaca catattcatt |
| 226261 | gcatgtttat tgtatatatc atagtcttaa gaaaattaat tgaactatgt tttacttaaa |
| 226321 | gggccatata gcagtgtggt taagagagat ctagatttgg agtcaaacac ctgtagctca |
| 226381 | agactgcctg gtttagaagc ctggcttcct tgtttactag ctatgtagcc tatagatcta |
| 226441 | agtctctgta aaatgggaaa acaatagttc ccatttcgta gggatttgat gatcattaaa |
| 226501 | taagttaata catatagatc aaattggtgt ttgaaacagt gattcactaa atgttaccta |
| 226561 | ttattaatca acttttgatt cagtcaacaa ctgtgttaaa gtttttgttt cctgattcat |
| 226621 | agtgggacta ataatactta acctcattaa gttctagtgg cagcataatg agttgatgct |
| 226681 | gataaagttc ttggaacaca taactgacca tcaagatata ctagctatta ttattattat |
| 226741 | tactcatttt gcttccttac actgagagat taagtatgtt aaaattgcta ttcttttcat |
| 226801 | ttatgctctt ttagtcacac taatcaggca tttcttttta gtgaacatca gttttagtta |
| 226861 | acaacatccg gtaggataga accactagat aaaagggata aagagggaag atttcttctt |
| 226921 | ttttgttttt gtgttgagac aggaaaaact ggagttttat gacaacttgt tgtttcattt |
| 226981 | tctctacttt aagatcttca tttgttttgt tactgtgttt tctcctctgc tattgatagg |
| 227041 | tctagtgtgg aagaaacttt gtcttctgga tttcttagtc tcttccacct gtgtctgggt |
| 227101 | ctttcctata atcgttctag ttttaatgaa atctattggc ctgcaattca ttttctttac |
| 227161 | acttaagatt ctgtaaagac tcaacctcca aataaaatag ttgtgaagcc actctcaaat |
| 227221 | ctgagaactg gagtttggaa gttttggact ctaaagtata tttcattatg atgcttaagc |
| 227281 | atgttggagg aggggatact ttctgaaaca tcttaattca cttctgtctt ttgcatttaa |
| 227341 | gtatatttgt accctacacg caagaaattc atttgtcagg gattgtgtgt aggtgctgag |
| 227401 | aggatgggcc gtggcaataa ttagaaaaac aaaagcataa aaagtgagga aggaagaaag |
| 227461 | gaatggtggg ttagtatcct atatgcggga tttcatactg gaagatctta catgcgattc |
| 227521 | cagggaaaaa cttacattga tacctagtga ccaaggcttt cctccagtaa atgagtaact |
| 227581 | gtaatgagta acaaactgta agtccactgc cttcaataaa acatgatgag tgaacctggc |
| 227641 | tgagcagccc tcaggtagtc gttaccagag aatgtagata acggccatga aatggtatga |
| 227701 | agtcactggg agccaagtgg gtgatcagat gtcctaggag aagcagacca gtgcacctgg |
| 227761 | tgacagtgct gggctgggct gaggtagggt ggggtggggt tgtgtatcaa aaccacacac |
| 227821 | ccttagaaac cttatagaac tctgcacccc tcggcaatgt gaaatcaatc caaattctct |
| 227881 | tgtgagcata aagaaaaata ttgacttcaa aatcattgat tttttccaaa atatccattt |
| 227941 | aaagattgac ttcttaagtt tctaaaaaaa aacctgccac tgttttacag gaataagaaa |
| 228001 | gatggtaggt aaagaataga caaaggggcc aggtgcagtg gctcactcct gtaatcccag |
| 228061 | cactttggga ggctgaggcg ggtggatcac gaggtcagga gttgaagact agcctggcca |
| 228121 | acatggtgaa accctgtttc cactaaaatt acaaaaatta gccaggtgtg gtggtgggtg |
| 228181 | cctgtaatcc cagctactca ggaggctgag gcaggagaat tgcttgaaac tgtaaagcag |
| 228241 | aggttacagt gagccaagat tgcgccactg cactccaacc tgggtgacaa gggcaaaact |
| 228301 | ccatctcaaa acaaaacaaa aaaagaatag acaaaggtcc agaaatagag gtgttactgt |
| 228361 | cctgtgaggc cggcctcatc taagtaagta gaggctggaa tttgctaccc atgaaccttc |
| 228421 | cttttccatt gataatgctt ccccactgat aatgtttcaa agccagaagg ctccagaaaa |
| 228481 | tcattggtca atagagatgt ttagctgaat gttagctgaa tgggacagaa cacatgggct |
| 228541 | gatgcagcca gggactgaag gtgtttgttg ttttttcttg ggcaactgac aatgataatt |
| 228601 | tggaagattg ggaaagctag caacttggtg ctgaatctta aatgaccgtc aaagaaactt |
| 228661 | ttgcttttgt aaatctatga aatctgaacc taagacttaa cctcttcatt tttcttcttc |
| 228721 | cactctctgc tttaagaggg tgcttttttt ttctctctct cccaatgaga attaaccaat |
| 228781 | cactttactt ttcacttctg ggggcagggg tgagttgact gaacattctt gcctattgcc |
| 228841 | tattcattcc ccaaagctga agtggttttt taaaagtcat gctcatcacc ccttcctctg |
| 228901 | gccctaatgc ttaacacctg tcaatgactt ctccttacat tttaaataaa attctcactc |
| 228961 | tttaccatgg gttgagaggc cccacacact gtggtttggc ctctccatcc ttatctgtca |
| 229021 | ccactttccc tcattcatgt actccaactg cacaggcctg agttttattc ctcagtagtc |
| 229081 | ccaagccctt gccccttagg atctttgttc tggctttttc ctctgcttga gctgctcttc |
| 229141 | cccagctcag catgttgctg tcttttcttc aaacttcaga tctctgctta gatgacatct |
| 229201 | ctgatgttct ttccttgaca aaactttcta aagctacccc tttcaatact ttcccttccc |
| 229261 | tcctgtagga cctgctatta tctctatctc tatctcctgt catctacatc tatagctaat |
| 229321 | gtctatgtct gtatctctat ctctgtatct ttctatgtat cttacatatt tgttgtatcc |
| 229381 | atacctcact aaaatgtaag ttctattata gcagcacccg tatctatgac attgtgcttc |
| 229441 | acatctaaga taatttctgg cataagatgt gtggagtgaa tgaatgaatt tcagctttta |
| 229501 | taccatccct gtaaaattcc agtaatgggg gaaacagcac agaactgctt gtaagataac |
| 229561 | tatccgtaaa ggatgtggta aactcttttt gagaagaaca ttgtttgcct gagaaaagga |
| 229621 | agagaaaata gcagtaatta taattatagt gatagctaat tactagctag gcactgtagt |
| 229681 | tacctttaca tatatttgct cagttatcag tattaactca agaaataaaa tgcactctgc |
| 229741 | aggtggcaat catggctgct cagcaaaagg cagctttccc ttggatggac tatgatgggg |
| 229801 | taggtcacat gcagtctgca taactgcatt ctacgtacct tctacattcc acatgacagg |
| 229861 | gaatgcttcc atcatgatta acattttctc ttcctgaata gagagaaaag aatgctatag |
| 229921 | cctataaata taaaaaggac caatgcctca caattaatgg attcattttg aaggcaacca |
| 229981 | agacaaagct ctttttgttt gtttgtttgc tttgatctct cttcaaactt tttattttct |
| 230041 | ttgtaatagg tcagtttggc tcctcagtgg cctcatactt cctcttcttg agatggatgt |
| 230101 | atggagtcaa tatggttctc tttatcctga catttagcct catcatgttg ccagaggtga |
| 230161 | gatctgactt ccagtttaca aaacatgctg aaaaatgttt ctcctagaaa agtatttatc |
| 230221 | tcttctttaa agtagaataa ttaactggct attttcacgt cttagagtca taggatttgt |
| 230281 | aatgagatta accttcaaaa tggtgcccat gggccaaagc tcccaatcct tgcactaaag |
| 230341 | ggggtgtaag cctcttgaaa ttatataact tatgtataat ttcacatgta tgtttaaatg |
| 230401 | tgtattttta tgtggaaagt ttcatggctt ctttcagttt cccaaggggg tccctgttcc |
| 230461 | taaatgttaa aaactattgt tcaagaggaa gactttgaca ccttgtgagt tgtatttctt |
| 230521 | tattttgcca agttagcttt gaaagaaatg cttccttaat gcaactcaaa gcctccagat |
| 230581 | tttctatact gaagaaacac aaaatgaaca ttttccccct aagatacaaa gtaagataat |
| 230641 | gcccacaaca cacacacaca cacacacaca cacaaatagt gggatgggat gagagtggga |
| 230701 | tgggatgatg aggtccaaag tcagaaacta aaacacatag agggtccaaa tcaaagaaga |
| 230761 | caaagccctg agctaatgtg gggaaagggt cagctgaggc caaaaagcta gactgaggtc |
| 230821 | agagccttca ctcatatgaa gttaaatgat tctgacacct ttgaatgctt accttacaga |
| 230881 | agttggatta ggttttagtt aacctacaaa ggacctttta ggaccagtat ttcaaagcaa |
| 230941 | atttggtcca tacagcattg acagtggcca aaatttggtg gttttgggtg actttttatc |
| 231001 | ccgatagctt caaatcagtg ccagtttcta tactaagact cctattaaca taataataat |
| 231061 | aataatgctt tacattcata aagagatttg agcttttaat agtacaaagc actttcactt |
| 231121 | cttttactta ctgtgcgtca caacaaattt atgatgtaga ctgtagaaga cattttcttc |
| 231181 | acccatttaa aacatgtaaa tggagtcaca taatgctgat gtgacttagc taacatcttg |
| 231241 | gaatatattt ttttattaag ctgatctagg actagaaccc atgattcaat ccctttctct |
| 231301 | aagattttgc actttaatcc actagtttta taatccttga gataattcca gagcttctaa |
| 231361 | agttgtctgg ctcgtagaag acagtgacca aagatcagag gtcctgtgta gtttatttcc |
| 231421 | caagtgcaca ctttcaggta atgaagctga atgtgtgtat tttatctatt tcaaattaac |
| 231481 | cccagctttt tttttttttt ttttttttgc ttacctttct aaggaaatct gaaactcctc |
| 231541 | cattccatca ctggctacta tgacgttact tagtgtcaga tgcaggtata aatggagttt |
| 231601 | tatcagcagc atttattctt tcccccacac catgctgcct ccatgtggag aaaatgaaag |
| 231661 | gctgttgctg atttatttga ataatacgaa attacagaat gtctgctatg tagtggatgg |
| 231721 | agtgcctacg tgttaggttg gatgtattcc aagagctagg aagcattctg tctttggata |
| 231781 | cccttttata ggttgtatta ggtgctgagg ggcatcctgt tttctgggca atgattacca |
| 231841 | actccagcaa aagaacaaga gaatggacac cctgcatgct gactttgcag aaccaccaga |
| 231901 | ggccagggca gtcatctcct ggcagcaacg ctgtattttt cagctgcctc tacccgacgg |
| 231961 | gctcactcag tattcctcca aggcaaatgc ccttttgccc caaggtcctg tgtccctggg |
| 232021 | caagcctgag accttgatct cctttgtcct ctgtgccccc gaactttggg gcgagacagt |
| 232081 | gtgtctggaa cccaccttct attctgttcg gaccaggaag ccagatgggc caaaggccta |
| 232141 | ctttgggagg ttgtgcagct tgtgcacagg gagtgagcag agattgatgt ccagcccttg |
| 232201 | ttcagtcaag ctctgcaccc aggcttcaag ccatattcat cttctgttcc cagctttagg |
| 232261 | agggaagttt ccatctcaca gaagaagcaa catctgcttg gtaagctatg ggggctagaa |
| 232321 | aggtgctctt tccagttctc accaaggcac cttcctatga ccctattctt gccctctcac |
| 232381 | tggcccactc ttcccagtac tattctccct accgtttttc tcttccaatc tggtagcatg |
| 232441 | aatttgaggc agcagtcctg aattagtgat gaagcagaca ccataatcag ggtgcaagtg |
| 232501 | ttctcacgtt gcagacaccc acaaattaca tgattggatt tccttgagtt ctctctcttg |
| 232561 | acatgaagga cagaatctcc ctccaccctc actcctaagg ggtattctct tatgaaagtg |
| 232621 | tgggtaagat tgttttgttg agtcctatgt gactcaaaag gctacctctc tcctttccag |
| 232681 | acttccaagt cagaacagtt tggtggtggt ggtggcaatg gggtcctcag aaagccctct |
| 232741 | ggggaatgtg gttgacctga ctgcbggtgg tcccctgaac ttggaatgca gggtcctttg |
| 232801 | cactcccttt gttcttacct ctggatttag tagtcgattc ccagaaaatg ggaccccaca |
| 232861 | tggagaccca aagagtcccc ataaaaatgt ttcagaaggg cttttaaaca aaaccatttg |
| 232921 | tgatcacatg tgtggctcag actttgtttc taattgttca ctgctttctt tgcttcttca |
| 232981 | tacagtacct ctggggtttg ccatatggca gtttacctag gaaaaccgtt cccagagccg |
| 233041 | aagaggcatc ggcagcaaac tttggtgtgt tgtacgactt caatgtaagt gtctccacac |
| 233101 | aagtgtattg gtgggaggat ggatttttat ttagtttatt ttattctgaa acccacggcc |
| 233161 | tcctctcctg ggtcaggctg aatgtcttaa gaaagacgtc cctgctccct ttaagaaaga |
| 233221 | aaggaaagaa agaaagaaag agagagagag agagggaggg agggagggag ggagagagag |
| 233281 | agagagagag agagagaaag aaagaaagaa agagaaagaa agaaagaaag aaagaaacat |
| 233341 | gtccctttat ataaatgtga ctatgattta ggacaatggt aatatgatta tatgggaata |
| 233401 | tagactactg gataaaggtg agctcagagt tcaaagactt gaagcaaata ttcttatcac |
| 233461 | tgactttgga aaagaataaa ggaagagttt gcaaatgtgc tttttggaaa atcttgttgg |
| 233521 | attcctaggg aattaaaact tttacacttc ctattaacct ctttacttcc taaacaagcc |
| 233581 | tcctatttag tattactcaa tagttagtac taaataaagc taaatattga aaactaagaa |
| 233641 | atactaaatt ctaactttta aataatacta aaattagtat tattccattg tagtattcaa |
| 233701 | atgagcatta ctccttgagc tcccttaggt agagattatt actatggaaa ggagttattt |
| 233761 | ctgtccattg aaaaaccatt ttggactata tgattcaagt cttcgacaac aatgtaattc |
| 233821 | cacatattct ttttttaagt agtgactaga ctagaaatgt ctggaagcat atgcgtggga |
| 233881 | aagtagccag gttgaaattg aggaattgat aattcaagta atttttggag gctagacaat |
| 233941 | gagaataaaa ttttatacag attgcagaat gaaggaggga aaagcagact gcctgtttat |
| 234001 | agtgttaata tgtatatctc acaaacattt tgatttctac ttttaacctc cttaaattgt |
| 234061 | gagtttccca aagaagagat caggtctgct acatcttttc agcccgtaat ctagtcctca |
| 234121 | tccactacag gctaaatgaa tctcattgac tgaaaatcct gagtgagggg gatgattcat |
| 234181 | agagccttga agtaagaacc acaggaccag tttatgtgag gagtaccaga acatgcaaac |
| 234241 | cttaagaaaa gtttcccatc tccgaatgaa caaagcaagc tattgagtta gcatgaggca |
| 234301 | caatgatagc aacaaatatg tggcatttgt aatcttcaat cacccctgtc agttggactt |
| 234361 | tccatttcaa ttcagcattt tttaaactga attataaact tgcataggtt ttacaaagat |
| 234421 | gaatgtgaca tgattcttga cttcagggta ctcgtgatat tagaaggaag acacgtaagc |
| 234481 | aaccagtata caagatgctg tgcacaaagt tagcaaaatt taaaaaaagg aaaaaagatc |
| 234541 | ctggggaact gagcaagtgg ttcttatttc ttcttaggcg ggtctgggtt ttacagaaga |
| 234601 | gatggcctct gagttggatt ttacctctct tttctatcac ttctagattt tatttctctt |
| 234661 | ttctaccact tctaacttct tccacctctt cctcctcccc tccctttatc cctcccttta |
| 234721 | tttatctctc tcactttcaa atttcaaata atgcattact atgtcccttt accactgttt |
| 234781 | taatttctca ttctcttcct ctgattagca aaatgacaaa cttccagtct gcttaataag |
| 234841 | aacaaggacg aagatcactg actttttctg ttttttaagg catagcagag aaaggaagga |
| 234901 | ctaaaaatat gaacaaaagg tcttttgatt tttatatata gatttctgaa gtttaaatac |
| 234961 | ttctgaattt cccaatgcac tgaaatggaa aattttgggc aaaaatgtcc atttgagatt |
| 235021 | tgaaagttag tgactcagtt gaggaagaca aacagaaaag ttgctgtaag agagttacta |
| 235081 | atgagtggac aagagggtct gagaggcaaa ttcaggggaa agtagaggga aagggtttgg |
| 235141 | atgatgagtg tgcttcccaa gattgtatca ctgcccttga cagctctctc acatccagtt |
| 235201 | tggtgaaata tgatttgtcg gtcagcaggg gatacagaaa ccagagtgtt ctatgatagt |
| 235261 | tatttcaagg cctgcctgaa aacaatacta aggcaatgag agaaatttta aaggtcaaga |
| 235321 | aaatataaga aagccattac actgatttta ttcacttaca ggcttgctgc atgctggtat |
| 235381 | cagtcattaa tttggtatgc atcattgctg gggttagtag tgattttaat agctgtattt |
| 235441 | ctccaatgtc tgcatcatgc agtgaactgt gattggtaag taaggtccct cacttcacaa |
| 235501 | cccacttcat ggtgggtatt tatatctgag actaagctcg agtgttctta tatgtgaaat |
| 235561 | ggagaaaata atagtatcta cctcaaaaag catcaagtga gataatgcat gaaatagcag |
| 235621 | atagctcaga gtatgtagca cacagtacag gctgagtatt ccttatccaa aatgcttgag |
| 235681 | accagaagtg tttcatattt caaatttttt cagattttgg catatttccg tatacataat |
| 235741 | gagatatctt gaagatgaca ttgaagtcta aacacaacat tcatttagtt tcatatacac |
| 235801 | ctgtacatat agcctgaaag tgattttatc caatatttta agtagccttg ttcatgaaac |
| 235861 | aaagatttga tggtgttttg actgtgacct gtcacgtgag gtgaggtgtg gaatttttca |
| 235921 | cttgtggcat catatcggtg ctcgaaacat ttcatatctt ggagcattta agagtttaga |
| 235981 | ttttttttta ttaggaatgc tcaatttcta aatattcctt attacaagaa ccataacttg |
| 236041 | accaaaggca aacagctatt aggaaaccga attgggatgc agggctggtg gtattacaca |
| 236101 | cggtaatgta tgtggatagt ggcaagctag taaaaggact tttattataa caaagaagta |
| 236161 | aatacataag taaataaaag tattctgacc ttaatgagga gttcttgaaa gattcaagga |
| 236221 | aaggaagcaa taggattata tagtcattat caaattgttc attgaataac attattattt |
| 236281 | aaaagaaaat aatactgctt taaggaattt tatatgatat acaagttttc atgacttttg |
| 236341 | aagtttgaaa gatttgtctt ttgttttggc aatgattata ttctaaattc agcaggaaag |
| 236401 | ataggttgat tcatattaag ggacactttg cttttacatt tttgtaagaa aaaggaattc |
| 236461 | agcccatcct acaataagct aataattgag cacattctct atactagggt caaaataatt |
| 236521 | tcacaagtac atcaataaga gagagggaag gacctttaat tattaaactg aagataacaa |
| 236581 | caagaaaaaa atgtacaaag cttaatttaa aatataggag atttggtttc acagtaaaaa |
| 236641 | tccaaaagaa taaagccaag tagtcactgg taataagaca ttatagattc aaatgagatg |
| 236701 | ctgtcttggt caggacgtgg tgtcctccac ggcagaaggg aagaggctgc ctgagcacag |
| 236761 | attgtcttga gtatcgtgca tagatggtag agatcagacg ccacagacag ccgtgggctg |
| 236821 | tccctttaag aactcccata gaatgggcag agatgtccta gaattggaca ataaggaaag |
| 236881 | agtacaagga aggaaaaata aaatctagcc aagctcaagg acctgtatgt gttacctcag |
| 236941 | gttaaccaga cgtttctcag aagacagaat ctaaatttct acttacattg cttttgtttt |
| 237001 | tattatcatt tttgtgaata ataccaaaat taatgtagac taagtactta tatgggcagg |
| 237061 | cactgtgctt agtgctatga tatttctatt tatttatgaa tattatactc atatatttat |
| 237121 | agtgatttat actacttgtt tcagtatgca tcaagaaatg gaaggcacag atatcttgac |
| 237181 | agagataatt taatataaga aattaaacag gtattgggtg actaaaaagg caaaagggga |
| 237241 | cattgaggta acatagaaat ggtaacaggt aacacagacc agtttttacc cctactgttg |
| 237301 | ggagaacaaa agaggaagtg gggttattag aatctagggg cttggaggaa gggcgctgca |
| 237361 | tggccccaag aggtgtgatg agattggttt tgagtgtgct cgaacagact ggaaatggaa |
| 237421 | ccaaataccg ttaccagagt gaagaggcat tgctggagcc atgcattcag gagagagcaa |
| 237481 | atcccttctc ctgacttttt gtctaagtgc ctcctatagg aaaaatctgc aaggaatccg |
| 237541 | atctcaaagg aaaaaagtag ctccccaagt cccgtctcca gcatcacaaa gcagcatata |
| 237601 | caaggatggg tctgaagctg aaacagctta ctaactggca cattattcta tttatattat |
| 237661 | gacctattcc tcttcctagt ccagtaaggt agatatgact attcctaatt tacagatgga |
| 237721 | gagactgagt tttagtagga tttggtattt tcctccaagt tccgtggatg gcaagtggag |
| 237781 | aggcbgggat gctcatctgg tctgcctgac atctctgtct gactctgaag cctaggacaa |
| 237841 | gctgcctcta cataggctac taggagccac tgagatggct acaggtttat actggaaatt |
| 237901 | cacaaaaata agagaatttt agaaatagag gtgctcttcg atatcttcca tcctatatct |
| 237961 | taccttataa agttacagaa attttgagtt actgaagcat gttcagggtc ttatagttgt |
| 238021 | taagaggctc ctaatctagt gttctcttca tgtcctgtat tccgcccgta attttcctgt |
| 238081 | tgtaatttcc agcaacattc tcactgactg ctcctggaac atttactgac tctgtttcat |
| 238141 | gatatatcta tttcacaagg ggaaatggag ttgaagcatt tgggccccat tttaatcttt |
| 238201 | cataataatc ttgtaattcc caaatcagct tctcaaatag aatgagagct ttcatgtttt |
| 238261 | tttttcctaa attctttttg tatcatttaa atattatgct ttattaaaat attcataatg |
| 238321 | gaaaatcata ctttgaaaat tgttattatt aattttgctt tggttggtta gcaaagttct |
| 238381 | atctttagtt tttaaaatta atttattttt gaaatagaca ataaaaatcg tatatttgca |
| 238441 | tgagttcttt gcttgatcct ctgaacaatg acttcataga ggtgctcact ctgtattgtc |
| 238501 | agatgatcta agtatacaac ccagtataca acccagtatt ccatctatca tggcaccatg |
| 238561 | gaggaaatca ttgacaaaat gtttttaaac tccttaaaaa ttcataatcc tgacttttgc |
| 238621 | aaagcccagg ggtgccaaag caggcatccc tgggcttttg aaaaatgcca ttatttaagc |
| 238681 | tagagccgtt atctaggcta tcattatcta ggtagagttt ggggtgtgtg tgacctcaat |
| 238741 | atgaaaacat ttggatccac tctcttggat ccaaagagat ggcatctgga ggctgtctct |
| 238801 | caaaggagat ctgagcagca cacccagcaa caggatcagc tgaccttgga cagactatat |
| 238861 | agaggtaagt tattccacat agaggcaggt gaacagaagc agaatagatt taagatctgc |
| 238921 | acttacagaa taatgtaaga taaacacaag catgatctct tatggtacag gagcctattg |
| 238981 | gatgggaagg atcagaaaat ctttggggta aggtagggga ggttgtgagg aactaccaat |
| 239041 | ctgtagagct tcatctggga accttggaac ctcctctcca tacccatgaa agcgcagtgc |
| 239101 | tctgtgactt agatgtatat atcacaactc atccaaattc tcttcagtta atagtagaca |
| 239161 | aacaccatac acaacatgca tgatcagcta gtctcagggc ttttcaaagt cagaatttac |
| 239221 | catttatgaa acactgtatt tttaaaatat tcttattgag tgcataatga tacatcttac |
| 239281 | tgatggtgct ggaaatctgt tttattaaaa tagtaagaaa cagagagatt attatgtatg |
| 239341 | caatgaatca aataagcaga aattgtatca tgtaaattaa tagaagcaga agaatgagtt |
| 239401 | taagtcagta ggaagaggat gtctttgttg gcaagatacc tggagagaca agggtgatat |
| 239461 | agaaatgata aagaagaaaa ggctacacag ttttaatatt cttgtgagga gaaagaagga |
| 239521 | ggaactaaag tggaatttgg aaggagcttc agctgatatc agacagtgag atcatatggg |
| 239581 | taaaggttta agttgtgagt aaagggaaat gcattctgct tttcaccttg agagcatctt |
| 239641 | gtacattgct gatggataaa tggtatgtct actttgcctc cccttttctg ctgattatca |
| 239701 | tagatgtggg agatagaaga tatcctacaa tgggcaggag aggagactta acacctatta |
| 239761 | tgtgttaagt aggtacatac attaaatttt atcctcataa caactgttta agatggaata |
| 239821 | tatcatccca gattattcct tctgccctgc ctgcctcaca tcccatcttg gaggtttgtc |
| 239881 | cttaaaggag acaggttaga cacatataga atgttaataa aaaggagata agttctttaa |
| 239941 | tcaacatcaa caactctttt cagtaataat gttccaaagt aaaggtgtct tctctcaaac |
| 240001 | atatctcagt tctcttaagt tccttcatct cttattgcac tggacacagg tagaggagat |
| 240061 | attttgtgat tcacacgtgg aataacacat cttttgtttt agaactattt cagtggttcg |
| 240121 | aatgcatctt tatttgaaaa ggtgaatcat tttaggtttc ctgaggtgta gacatcaaaa |
| 240181 | ttatgttaca tgcaggagat attgggggag ggaggcgtgt gaaggataaa ggagagagtg |
| 240241 | aacaagagta gacaggaaga gcttttagat ggtaatgcag gccctatacc tgtgaaagga |
| 240301 | gagagaaaag gaaggattta ggaagagtct cagattgtac tacagttttg aaagagtctt |
| 240361 | ggccaggcta acggtgagtc tctaaacaaa gtatgtccat tagataaatt ccatattggt |
| 240421 | tagcaataac ccagctccag tatttcccat catgctcagt cattatctag gtagtggttg |
| 240481 | gggtttgtgt gacctcaatg tgaaaacagt ttggtccact ctggtgggtc caaggaggtg |
| 240541 | gcatctggag gctctctctc aaaggagagc tgagcagcac gcccagctgc taccttgaaa |
| 240601 | atgtgactgg gctcctccac tttagatcat agctgttcat attgcbgttg ttgctgttat |
| 240661 | ttagtttcaa caggtttcaa atgcagccag aatgacctgt ttcccacatc catcgtctgg |
| 240721 | gcctacctcc gtgcbgggtc agcagaggct gaacttctag atcatgaata attcttcggt |
| 240781 | ggcatgaccc caagcgagac tgctaagcct cttgtggaca aatttagagt tataaatttt |
| 240841 | caaatccacc tagagatacg tctctttccc tagtagcaga gatcataact ttggaggggg |
| 240901 | tgaggaccct ctcatctgtg gatgtagtga gattcctcca atggctttgc tgagcagggt |
| 240961 | gggctgctgc tcaggcatgt aacgcbggga ctggcagtat caaagggctc tgtcccttat |
| 241021 | ttacttcact tcctcaatgt ccagtgtggg tctctttggt tcaacaggct tattaagttt |
| 241081 | gattaaaaga agatgcattt catgttctat tctaggtcct agatcacttc ttttgctttg |
| 241141 | taagcttctt aatttgctac tcctgagtga ctttatgaca cagctctagc ttgtgacgag |
| 241201 | agagattcct gggtctgctt ttagcttcct tggtatttta aacttgggga actgatttct |
| 241261 | taaggtctga agtcctagcg atgccttttt tttttttttt tttttttgct ttagtaacac |
| 241321 | attttagttt tcatcacctc cctcaggcta cacttggcca aaccaaaagt gagcttttct |
| 241381 | tttgcaaata ttagggatgc atatgatcct aatgctatac ttacaatatg aaaacagcat |
| 241441 | tccttctttg gaagtgacca tagaaatgag tcttcttttc attaacatag taaacatttg |
| 241501 | ttgggcattt gccaggtgcc aggcattaag caaagatgag aaaacccaag gtctctgtcc |
| 241561 | tcaggaacat aaagtccgag ggagtagtca aataatcaca aaaataaatc caactgtaat |
| 241621 | tgtgccaagt gctatgaagg aaagctatat agtgttaaga gaacttatag aagacaacct |
| 241681 | gatgtggttt aggagctaaa ggaaggagac agataaaaga aaatattttt ctctgagaaa |
| 241741 | gtaatgttca aattgggctc taaggagtca ggacaacctc tgaatttgaa agaagggaga |
| 241801 | gatattctca gcagtaagaa catcaattac agagaacgtg tgatgataag aggtggcctt |
| 241861 | attcagggga ctgagtaaaa cgagagagct cagaatgtga agggacatca gaacacaagg |
| 241921 | cattggagag acagaaggga accaaagcac gtgggatcct ctaaaatcta gactgcacta |
| 241981 | attatttttt ttttttctca gagcaattaa aagtaactta agtggggggt aggtgggtag |
| 242041 | taacatatca gacttggatt ttgaggtaat caacagactg tagacgggca agatggctgt |
| 242101 | gaggagatca aggaagaatc tttcgatatg actaggttag agactaaggt tggaagagct |
| 242161 | aaatttacct ggcaggaatt ttctatatct aaatattggc tgccaaacta atagattaaa |
| 242221 | ggatgagcca ttgagttagg ttagaacttc acaatgcatt aaattatagt caataattta |
| 242281 | aacacatagc accaaatcat aaatctaata catctgtggt gacaagtaga ttatgtaaat |
| 242341 | ctacattcat ttttttccaa gtagctgcaa tatattcttt acattttaaa ttattttatt |
| 242401 | tgttcaaaaa ctccttttta aatacataat accaaggcat ctcccagtat aggctgtgtc |
| 242461 | cagatgacca cacacgtctc gtttcatgta tgaattcaca aagcttcact ctgaatattt |
| 242521 | taaagaacca gcagcaaatt tataactcca gaagtcaacc agccaacaaa accctctaat |
| 242581 | atgcttttaa tctcctcctt gcgaaatgaa agaagacaac ttttttttct ttgtggaaag |
| 242641 | aaattataca taaaagctca ttttatagca ctgagactgt ctcattttgt taagagtttt |
| 242701 | atgcaattag acagtaggaa aaattaaaga gtttttccag tttcagtgtc tctcagacac |
| 242761 | ttctttggtg ttttgattca ttaaatccca acataagatt attattgcca cgttactgtc |
| 242821 | ttggatgatt tactctattt tattaaaatg ggtagcagag agcagaagaa taaaaaaagt |
| 242881 | tggtgtacat gacaatttaa aggagcttat tctaactgag gattgctaat gattaccaga |
| 242941 | agcaattttt ttttgttcat tcaatcactc cacaaatata aattgaagtc agatgttggg |
| 243001 | aatacaaaga caactaacat atattccctg cccacaggga cattatgatc taattggata |
| 243061 | tgcaaacaaa caattgccat gcaaaatgac aatctgaggc tgatgtacat atgtcttagg |
| 243121 | cacttgggaa cataatggaa taagggttca gtgtccgggt taactggcat tcagatactg |
| 243181 | gactcttgag agagcccagt aaagagaacc tctatttccc atgtgagttc tgaataattt |
| 243241 | gtttaaaaag aagaggcaga tgggcaaaaa atttttccac attcattatt aatggaaatc |
| 243301 | gaattggagg aacaatccgg aattcttagc caaatggtct tgctgattta gaaccccaaa |
| 243361 | ttagccattt tacctctagg gcaacttatt tcctagaaga agaaagatat gtttgggctg |
| 243421 | ggccagccca gttaattctt tcccagttta ccaacagaaa tcactatgcc tttcctggtg |
| 243481 | tgcagtgagt atagggacag agaaaagctg aggcatattg catcaagtga agctccgtgc |
| 243541 | ctctgaagga aatgctgaga gaaaggaagg ggcattcatt acccctatca caactggctg |
| 243601 | tggttgagag gtcaacaaag gctttacaag tatcttgaac cagctttaaa gaaagagtag |
| 243661 | gaatagagca ggctctagaa tggggcaggc aattgggaag cgaattccaa gcagagagat |
| 243721 | cggcatgcac aaaggcatgg aggcatgaga tagtgctatg ctctcaacac ccaagagtga |
| 243781 | ttcagcaaag ttcatattta gggagaaagg agggcagcaa gaggtgagcc tgtcatacta |
| 243841 | aaaaaaaaaa aaaaaattca aaaaagagcc tgatcaggga gagaatttca ttatgctcaa |
| 243901 | gtcagacttt atcctatagg cagcggagcg cacctgagat aggaggaagg agcaggtttg |
| 243961 | gggaattttc ttgaatgtgc tatgttcatg cttcctatga gacatgcaag tggagtgaga |
| 244021 | tgtgtaatgg cattgggcat agggtctaga attcccactg ttagtgtcag tcgtgggcca |
| 244081 | tggcacaaaa ggcaaatgga agtactttct atagaagcca gaagagttaa aaatgcagtg |
| 244141 | tagcataatg acaaaaacta ggcatgagat tccaacaaac ctgggtttga atcctgccac |
| 244201 | atacgaccta tgagatatta gacaatcatc ctgaaccttg tagttgccat gtataaaaca |
| 244261 | gcagtattaa tacctagcta ccaggcttgt ataaaaaata catgagatta tgtgtgtaaa |
| 244321 | gtattagcac atctcggctg ggcgtggtgg ctcacacctg taatcccagc actttgggag |
| 244381 | gccgaggtgg gtggatcaca aggtcaggag atcgagacca tcctggctaa catggtgaaa |
| 244441 | ccccgtctct actaaaaata caaaaaatta gcbgggcgtg gtggcgggtg cctgtagtcc |
| 244501 | cagctactcg ggaggctgag tcagaagaat ggcatgaacc caggaggcgg agcttgcagt |
| 244561 | gagccgaaat tgcgccactg cactccagcc tgggtgacac ggtgagactc tgtctcaaaa |
| 244621 | aaaaaaaaaa aaaagtatta gcatggctct ggcacatagt agattcttct ttaaatgcct |
| 244681 | cttcaggata cttagctcat gaaaattccc atttgttgga gggacaagga aacagaagga |
| 244741 | aggaacttgt agccagagca agaaagtgga agtggggcag cagccatgtc ccctgtgtag |
| 244801 | gcaggaggca gggggacaag agtaccaatg caaggatgga gggatggata cccaaaggaa |
| 244861 | ctgcctcatt cacagctgct tgaggggcag agatcactgt ctacagtcct taacacaact |
| 244921 | tgattccctc tgctgaaaat tagatctgcc taggctcagc tcagcttcct ctttgtactc |
| 244981 | cacactgtct ctgttaagaa ccatagagca cctgtttcat gtctatgaat ctgggttgga |
| 245041 | gcaaaaggaa aataaaataa aaaaaactca gagatgagca aagtattagg cagaagccta |
| 245101 | atgggtctgg ctggagagga ggagtgtggc catgcgctgc tgtcagcatg cagctcacaa |
| 245161 | ggcccgggct ggctgctgtt cttgtgacgt tagttgaggt ttattctggg cataattagc |
| 245221 | cttttcactc cttgtttctt tcctgtgttg cgtcctactc catgaaatgt tgagtgccag |
| 245281 | tccttgtctt tcatccacac ttgaaacctt cgttcatgct aaggtgtaaa taaccagcaa |
| 245341 | caactcagag aaaagtagaa atacacccag acttgaatct tgcagtgtca cctcccctca |
| 245401 | cataccctca gcagatatgc ttaaaaaatt atatcttcct ttcctaccag ttttacttta |
| 245461 | tacattcttt caaaataatg gtctggcagc tattacaaat taaaaagagt tactaagaat |
| 245521 | gaagaaattc aatgatcatc ctggggatag agtgttatct ttcatggtga acatttcttg |
| 245581 | gtaatcatga gaaacaccaa agggatgcag ttttaatata atttcaggca acaaataatt |
| 245641 | atgaaggaga tgttttgcat gcagagcctt ttggggacct ctgaaatcct gtctcctaat |
| 245701 | ccatctatgt atattgggca aatagtaagt tctcaataag tgttagttag aaaagtaaat |
| 245761 | gcatgaattg agtcctggta accataataa aaacagtctt tcttgtggaa atgtgttggt |
| 245821 | gattatggac tggaccagct gcagcaatca aacagaaatt agagtcttaa tagacaacac |
| 245881 | acgagcatgg caccccagag ttggacagaa attttctgtg ctcactggga acttggctct |
| 245941 | gactctggtt tctctgtcac agattttggg gtgggagagt gctcccatgg ggaaagcagc |
| 246001 | acgtgctgat atcgaaattg aatagaacct tggctgggct aggagtcatt gctattttag |
| 246061 | tcacttccag atgtctgctg ctgtagtttt aagggacagg gaaagatgag tggagtgtgg |
| 246121 | catgccactg ggtaaaagat gaggagcgtt ctccttctaa gcccttcaag ttgtatttaa |
| 246181 | agccatccct caatatgcta caaagatgga ttggataaag cctttaaaaa ctgtgttctt |
| 246241 | ctattcacaa tagcaaagac ttggaaccaa cccaaatgcc catcaatgat agactggata |
| 246301 | aagaaaatgt ggcacatata caccatggca tactatgtag ccataaaaaa ggatgggttc |
| 246361 | atgtcctttg cagggacatg gatgaagctg gaaaccatca ttctcagcaa actaacacag |
| 246421 | gaacagaaaa ccaaacacca catgttctca ctcataagtg ggagttgaac aatgagaacg |
| 246481 | catggacaca aggaagggaa catcacacac tggggcctgt tggggggttg ggggctaggg |
| 246541 | gagggatagc attagaagga atacctaatg tagtgacagg ttgatgggtg cagcaaacca |
| 246601 | ccatggcata tgtataccta tgtaacaaac ctgcacattc tgcacatgta ccccagaact |
| 246661 | taaagtataa taaaaagtta attaattaaa aataaataaa caaaaactgt gctttttaac |
| 246721 | attcatttat agatttgact tcatatatat caaataggca aactgcagaa acctttgtga |
| 246781 | actaatcatg actctgcctg ccccaactag aaaaacaaaa caacacaaaa caaaacaaaa |
| 246841 | ccagaaccat tcttgggctt tggttatgat ctagtattta tgaagtgcca gccattaaac |
| 246901 | atatgttgaa tggtacctat gccagatgag ctggctgccc ccagtagcta ttgtgctaac |
| 246961 | ctaacaagct caccagatgc ttgttctata tctgctttct ccttttatga tattttcggt |
| 247021 | gtgtctttta atcccaaaat tgtcattatg aattagataa aagatatcag gtggggggtg |
| 247081 | accccctctg aaatattctc aaaagggatg cctggggttc tttccaagag gccctgtcac |
| 247141 | caccagggac cagtctaggg tatagatcaa agtctgtgat gggttcatag agtttcttgt |
| 247201 | ttctttcctt tctttcactg agaaggtatg gcactagcat gatataactc ttgctggata |
| 247261 | aagaaagcac aggagaagca gtatagtgca gtggttaagc atataggatt tggattagac |
| 247321 | tcaggtcaag ttcagacact gtcactcatt agtcatgtga acttggacaa attacttaac |
| 247381 | ctctctaagg ctcagtttct tcatctgtaa aataggtata gtgatagcag ctattgaatt |
| 247441 | tttgtgtgtg caggagaggg gaaaattatg gtaaataata attcctccct tgtccaacaa |
| 247501 | gattgtgagc tcaccggaaa tataacaaag ggtaagacca gtgaaggtca acatgccgcc |
| 247561 | tttattattg ttaaagctga cataaaagaa tgtagtgtct ttatggacaa gtgaacttca |
| 247621 | cagccagacc tctctgccag gacaggcctc tccttgcagg agcagagcac agcatgttcc |
| 247681 | ctctcaagag aaggaagaga tgtccgcatg tctccatcca tgctctactg tcaaatcagt |
| 247741 | cacttttccc cgaggctaga gtgaggcagt ggagggtggc tgggagtgtt atgttaatgg |
| 247801 | gtcttcactt ggaagggaac gtcaagagtt ggagatacga ttaccctagt agcagcaact |
| 247861 | tcatagtgtt ctcctgagga ttctgtgaga taaaataagg tgtttggcaa gtgctaaatg |
| 247921 | ttcacgaaat gtatacggtg atgttacttg tcacagcaac cattatcact gagtgtcaca |
| 247981 | tctgtggcaa ggaaataggg caatgaaaaa cagagacatt tggaagttgt ggtgttgtcc |
| 248041 | catgagggtt aaataaagag ttcaggatat aatctttaaa ccaaacaaga gattaagtgt |
| 248101 | ctatacttag catgttctgt tattgtcacc ctgggacaga ggaacaagca tgaaggttta |
| 248161 | agacatgata gaaggagatt ggatttaaca caagtgggaa gaagcagaga tcttaactag |
| 248221 | ataaatgtga aacaagaaga tgtcatgcac ctgggagctg ggagatcctc ccaagcatat |
| 248281 | tctcctggga tgaagatttc tgggtcttgg ggagttggtc aatccatgtc ttatcttaga |
| 248341 | catgagatta gctcacccac tccctctgct tgaggtttct actagctgtt tatccccaaa |
| 248401 | tgttctgttg gatggcatcc tagtcagggt tctccagaga aatataacca gtagaagata |
| 248461 | tgtatacaca catacacaca tatacatata tatatatata aaatttatta tatcaatcta |
| 248521 | gtatttatat aataaattta ttttgattta tcattattat tacttaaatt tattatataa |
| 248581 | atctttatat atatatatat gcatataaaa tttgttgggt tttttttttt ttttttgaga |
| 248641 | cggggtctca ctttgtcacc taggctgcag tgcaatggtg tgatcttggg acactgcaac |
| 248701 | ctccacctcc tgggttctag caattctcct gcctcagcct cccaaagtgc tagaattaca |
| 248761 | ggtgtgagtc accatgtctg gctgatatat ataatttata agttaatata aataatagat |
| 248821 | ttactacaga tataaaagga gattcatttt gaggaatagg ctcacacaac catggaggct |
| 248881 | gagaaatctt ctaacctgac atctgcaagc tggagatcca gagaaaccag tgctgtaatt |
| 248941 | cagtctgaat ctgaaggcct gagaaccagg ggagccaatg gtgtgaatcc cactctgagg |
| 249001 | gcaggaggag atgagatgtc ccagctcaag cagtgagtga ggcaggagaa aaaggagcaa |
| 249061 | atccctcctt cttccttttg ttcttcctct ttttgtcctc agtggattaa atgatgtcca |
| 249121 | gccatgctgg ggagggcaat ctactttact gagtccacct atttaactgc tcatcttatc |
| 249181 | cagggacacc ctcccgggca tacccagaaa cagtgtttga tatggacacc ccatggccca |
| 249241 | ctcaagttgg cacatacaat taaacatcac aagttggctt tattttttct taaactgaaa |
| 249301 | aatgcagata caggcctgtg tggcccaggg aaacccagac ctttggtatt tacctgtgat |
| 249361 | tcattccgtg cagtcccgag ttaagcacac aagttcctct gagattattt ggagatttta |
| 249421 | ttttgttcta gttcttaaag agtacaatat ttaagaaaat ttgccccata ttttgaaagc |
| 249481 | aatagttttt cagatctctg ttggcctctg atttgagtta ggcatgatgt ttgtttaagg |
| 249541 | caattttcta aattacttct cttaattctt cctctaggaa ttagcatcta cgacatttct |
| 249601 | actttctttt ccacacctcc actctccccc acttcacttc ccttcttcag ctgtgagtgt |
| 249661 | caaagtccct gggttcgtat aaatgatgtc aaaggcaacc aattgggttt tctaagattc |
| 249721 | agggttgact cacctgatct caagaggaag ccccatattg acaagtgatt atcttctcat |
| 249781 | ttcacaaaac atagttattg tcagagagaa gtaagagggg agcbggggag tggatagctg |
| 249841 | tagtgataca gtaacagtgc ttcaatgctg aaagtgaaaa acacagtgaa tgtgaggaag |
| 249901 | agaaaaggtg catattataa aggaagcagc atcagaatat gccaatgttc tgagaataaa |
| 249961 | gagggagtta ttcaggtggc tttgagagag ggtgatttca accctggcag ataattttta |
| 250021 | ggaacgagaa tctaatgcac aagtaaacat gcttgttata tgggaatgct gtgatagtct |
| 250081 | tgatgaatgg gaagtgtgca gatgagttcc aatgtcatcc cacctgctct ttgatatttg |
| 250141 | tgaagtgaga gctgagacat aacctctgtg gtttaagaag aactgatcta attatggtca |
| 250201 | ggtgattgga aatggaaatc tgccacagca ctttgaggaa gcatttttca gatccccatc |
| 250261 | ccctagtatt aagcaaactc ttaaaatcgt aaatctaatg ataccacgaa atgtgttttg |
| 250321 | atgtttaaat caaagggcat ttcacggtaa tggctccaca gctgagcaag cctgtatttg |
| 250381 | cttaaaaatt ttatctattt agaagtcact gattttcaaa taaactgaaa agctgccaat |
| 250441 | caacatggca gctgaaacat tcactttatg gagcaaaaca atagggctca tgtcagagct |
| 250501 | gtgacccaag tttgaaaatt aatgtcattt tgttatttct cttaagagtt gatcttttcc |
| 250561 | tttgagttgc tcttcacgac aactgctaag tggctttgtt gttggatttc agggtttggc |
| 250621 | acaatattcc gttctctttt atggctatta tgacaataaa cgaacaattg gatggatgaa |
| 250681 | tttcaggttg ccgctctcct attttctagt ggggattatg tgcattggat acagctttct |
| 250741 | ggttgtcctc aaagcgtaag tttcatttgt cttttgggaa gcaaataatg atttctggaa |
| 250801 | tcaaatggag ggattaattt ggggattgga tataattttg ttgctatttt atgtctaaag |
| 250861 | gaaacagagt ctgtaagaga tgaaatgtag ttttaatacc aacactaatg ttagactatt |
| 250921 | acatcttcaa aagaactgaa cataaacaca ggcctttgag tcatctcatg gggtcagacc |
| 250981 | aatgcttgca tgcctatctt gtgtttaaac atatttttta aatgtgtatt tttgtacttg |
| 251041 | aaggtgtgaa ttaatgttgc cagcaagaca ggaaaacagc tgcbggtctc tcttttgcgt |
| 251101 | gcagagaggt ttgtaacttg cagaatcagc tcaataggca gaatctattg ttctctgctc |
| 251161 | attttttaaa aaaaccagaa taatcactca ttcaaaaaat tttagctgtg taagacagca |
| 251221 | aaaatgaatg gtccccaatg aaaccatcac aatcaactgt ataatcatgg tttgtcttgg |
| 251281 | gaaaagattt attggagtat ggggaagaat ttcactggag aactgatatt actgcagttc |
| 251341 | atttttctcc ctgcctaaaa ttatttataa tactccactt aaagactgca gaagcctagc |
| 251401 | agagttattt gggtttatat attaaaaaaa tgacccttta gccaattttt tttgaactag |
| 251461 | tttacgagaa gagttgaaac atctcaagta aggttgccat tcttttattt gactatgtgc |
| 251521 | aagttgaatg agcttttccc ctcattgtag gaggtccctc agcctgaggg tctaagaggg |
| 251581 | gaaaagtgca aagtcaccct aagcaggagc tctctgaagc agtctgtgac acactttgtg |
| 251641 | tcctaaacct gcctcactta cttgttcctc cagagaaaac tgccatattt catttttaag |
| 251701 | ctcttttagg acttaaaacc ttataggaaa tcctatatct aagatattta tcaacctgct |
| 251761 | aaagtgtaat cagagacctc aaatataaga gactgtccat cagataaact actatcacat |
| 251821 | tccaaaaatc gaagatattt tctagtcttt tgactatatt gctctggttg ggctgaagtc |
| 251881 | agaggtatca tttacattac tgaggcctca tgagtatcat ttctgtgttg ctcctttagt |
| 251941 | ttctgtggtc agtggagaag aatagtttct catgtctgat gactcagctt ttattccggt |
| 252001 | aactgtgcag gctgtgtacc ccacagccat tctgcctagg ttcaaatccc agctctacca |
| 252061 | tgtatgtatt tatacaatca ttaacagatg gctcaactgc tttgttctcc tgtttcccct |
| 252121 | tggtaataga ggtgtaatgg atgtgaggac taaatgaatt aatacaaaca aagcacttag |
| 252181 | aatatgcctg gatgagaaaa ttattcaaca aatgttaaca attttattag gctatatttt |
| 252241 | attaggctat attatatttt attagcctat aattcatagg cttatttaag aaaaaaagcc |
| 252301 | agcatggtag gagttgaggc cacattatag atccccaaaa caaggcagtc atgtatggtt |
| 252361 | atgcagttgt acatcagtag atttgtatat ttaataaatg attttctggc agatgaattt |
| 252421 | aaagtatcta gagcagcatt gtgccaggca agccacatat ataagtttaa aacttctagt |
| 252481 | agtcattaaa taaatagaca ggtacattta attttaataa taaatatatt tgctttaact |
| 252541 | caatatatca aaagtattat cattttaacg aacaatcaat ataaaattat tattgagata |
| 252601 | ttctctgcct ttcgaaaggt atcaagtctt tgaaatctgg tgtgtatttt ataccagtcg |
| 252661 | catttcaatt gttcagtagc cagatgttgc tggtggaaca ctctgttggg tagagtggct |
| 252721 | ctagaggaag tagtggcttt ttcaaagttg ctcgaagatg ccatttggga tagctgcagg |
| 252781 | gcatcaaatc cacattttcc ccctcaaagt cattcatgtt atatcatcca aaccagtgtg |
| 252841 | gccttgaacc ttccctctgg catggacctt tggctgctcc ttacctggtt aacaagtagt |
| 252901 | tcaaactcat tgcccaaaca gcaagacaac tcaaaaacaa tacaccactc tcactccacc |
| 252961 | accagcccat gggagaatat tcagtagaaa aagaattgat gagatataaa tctttgtaca |
| 253021 | gaatcattaa tcatctcttc ctactcctat cccagtcaaa tattctcttg gaataagttt |
| 253081 | gagcggattt atgacataca ttactcaaat ggaatagaag gtaacctaag ttctaaaatc |
| 253141 | gactaggcta catcaagatt ttttcactgt actcattctg ttagcgtctg catactcatc |
| 253201 | cacaaaatgg gagcaaatat ctatttttag ttacttaata gcaaaatcag aaaataaaaa |
| 253261 | gatagaaatc caagaaaata gtttgaaatt ttaagataag atgactaact ttgttggccc |
| 253321 | aggattctcc tggttttaga actgaaagtc ttgcatttga gaacctttca gtccccaaca |
| 253381 | aacatggatg gttggtcacc ttggttttaa gtccttccct tttcttcttc ctcccttcat |
| 253441 | tcatttcttt tatccttttt ttttttcctt ttctttccag gtcagtgtac attttcaacc |
| 253501 | acatcatatg cttagaaatc ttcatgataa atatagttac ataagtatta aaagcaaatt |
| 253561 | aaaacagtat aacataaagt tacacaacat ggaaaccatc agctcattta aatattgtcc |
| 253621 | tcattagttt gaagttttat atcataaaat aaaggtggct tgacatcaga acccaactgt |
| 253681 | tcccgttaaa aacaattctc taagctaaaa atttggggtt ttactggtct attttacagc |
| 253741 | agctaaacta ctggaagcag ttgaatcatt ttgagaatgc atgtcttaat aagaaactca |
| 253801 | tagctatttt atccttgtag gctttttcaa gactttttcc tgtttgtagg atgttttagt |
| 253861 | ccatttcgtg ttgctataaa ggaatacctg aggcttggta atttgtaaag aaaagaggtt |
| 253921 | tatttggctc acagtctaca gactgtacaa gaagcatgga gtcagcttct gcatcaagtg |
| 253981 | agtgattcag ctgtttccac tcctggtgga aggcaaaggg gaaccagcat gtgcagagat |
| 254041 | cacgatggtg agataggaag caaaagagag atggggaggt gcbgggctct tttaaacagc |
| 254101 | cagctctcgt gggagctaat agaataagaa ctcacttact atcccctgca aaagaaggca |
| 254161 | ttaatctgtt cataaagaat cttcccctat gacccaaaca cctttcatta ggctctacct |
| 254221 | ccaacattga gatcaaatct ctacatgaca tttggggaga caaacagcga aaactcagca |
| 254281 | cagggctccc tgggattaga tataattttt ctgtttatga tcctggctat aataatactc |
| 254341 | atagaatgga ctaacaaata ttcttggata cttaaatcat gtgctatacg taacccttaa |
| 254401 | atggtgtcaa aatttttgtc tacatagact ataatataga ttatatatat atgagatata |
| 254461 | tattataaac tacatatatc acaaaccaac ctcaacacat gcagataaat atttttaaat |
| 254521 | ttggcaaaat gacagtatgt tcatccatat ttctggagct gcaacaataa ttataaatta |
| 254581 | tacttgaaat aataataatt aacatctgtt gagcatctct catgaatcag tttaaattac |
| 254641 | attacttcta atccctaaac attgcaaagt agctattagt tttataattt tacagataat |
| 254701 | gaaataaaac tcagagatcc taaatgaact gcacaaggtc atttgactat aagacctctt |
| 254761 | tgaatttaga gttttctagt tcaaaagata tcttctaccc cttacacctt gccacctctc |
| 254821 | tgtactgtgc ttctccttac gtaggccaag gtgttcctcc caccaatctt atatactgtg |
| 254881 | ttgagtaccc attagttatt cctattggat ggatggagaa attaaggctc agcagagttt |
| 254941 | gaggatttca ctaagttcaa atgcccagta atttgcataa ctgaactttg aacaccttgc |
| 255001 | tttaatttca gcacttagct tttctaattt ctgatgtgga ttcatctata ttgatgataa |
| 255061 | caatcatcaa tatagactga tgtctctgtc tcgtcctggg tagccttttt atttttaaaa |
| 255121 | attctgtatt aaaatagttt cttgtctgtt gttaaattcc cttagagttt tatggccttg |
| 255181 | atgtgactca tgtgaccaaa cgttttgtta aaaaaaaaat taaacttatc aaaaccaagt |
| 255241 | ccttgttcta caagactctt gcatattcca agataaatca tggccagctt cacacacacc |
| 255301 | atttctaaat caacgagact ttattttctt ccttctactt agatgtcagt gcctttgtcc |
| 255361 | attttctttt cacttctttg gtacatgttt acccagacag ttatgaccta cctgatactc |
| 255421 | tgcctaaata tcttccatgt ctcttgacat ccttaatttc ttaacattga aattgtttct |
| 255481 | ttttcctccc cattttccca cccccaatta atttttttct ttgtcgaagg aatttctcct |
| 255541 | tatctattta gtagaaagca gtcagagtgc ctcatagacc ccagtctaat attttacttc |
| 255601 | tcagagatat tttcattgga gatcataatg tttgatgtat gtaatgatga atttcagacc |
| 255661 | ctagagaaag ttatggaagg gtaagtggac ctggcctaca gggcatgata ttctggcaaa |
| 255721 | tcccacaaaa catatggtta tctcatcttc ctcaaactat agttgacctt atttcaaaaa |
| 255781 | tgcttggagc agaaaagcaa cgaggtatga aagacatgaa gtcaccacct tccattttat |
| 255841 | attactactc tatgaattgc atctagattt taaaactcaa cataaaaaac tgtcttcttg |
| 255901 | caagcatgga ctaataagga tagtagtagt tcacaaagaa tggcagctat ttacaaagtg |
| 255961 | aggtgatatt gtcaaaacct atcataatga caaagacaga actaaacagt gatagaataa |
| 256021 | caagcatatg tggtatgcat ttattatatg tattgtgcca tgcaaaaaag caatttatgc |
| 256081 | tgtatgtatt tacttggtga ggctctttcc agtgctaagt ttacttctag aatgacaatt |
| 256141 | catgtattca ttcatttgat tactatttgt ggaacaccta gaatgggtaa tctaagagaa |
| 256201 | ctatccagta cctgggtatt tcatggtgag caaaataaag tccttgcctc tgtggtgctc |
| 256261 | agttggggaa atattgtaaa caaagaaatg accagtggtt ttggccaatg tagtataatt |
| 256321 | ttatgttgtt gttatcctct gcagtcaaat atttgctaca gcttcttcat cctcaagaat |
| 256381 | tttaaatagt tgagaagagc caagatggct aacaagatgc agccaggaag agcttctccc |
| 256441 | aatgagaaac cagggtatta agaagattgg cacactccaa gtagatcttc agaagggagg |
| 256501 | cattgagagt ggatggagga aggatgtaga ctctgtgctg aagttagagg aagcttggaa |
| 256561 | tgctatgctc aggaatgagt tctaggactc attcctggct ccgagtgtct cctaaggaag |
| 256621 | ggagagttaa ataggcgtgg agtagcccac tctcaccatg gacctccata attctagctg |
| 256681 | caggagtctc aatgaccccc atggatattt gaactgatag ggggagctgc ttgaagagtt |
| 256741 | gacagggaca ggactgcaga ctgtgtggag ttcagaggat ttggcaaagg aaggactgca |
| 256801 | gtagagcaca gccaaggaca cccatccctg aagactcacc atgcccctgt aggctttggc |
| 256861 | ctttgttgac tgtcagacca atacagagca gggctgtctt gcccatggaa tgaggccatt |
| 256921 | ctgatctgag tgcctccctt gtctgccagc ctttcctgag gttcatgcca ggctgtgccc |
| 256981 | acttgcagca caggcttgga tgtccaactg gggcacttcc taaaggccat catcatagct |
| 257041 | tctttgttgg cagaccccac ccaactgttg gagagcttct gaagacaagc ctccacccgc |
| 257101 | acacaaccac ctgcagcctc ccccctctgc tttgccaaca cgcaggtatg catggaccct |
| 257161 | gctgctctgc tgccaccaac acatgagcac agaccccact gccactgccc cgacaaagca |
| 257221 | ctgttgccag caaccctcat ggagcattgt tgttaacaga ctggaaacac ctcagctcct |
| 257281 | tcagcacagc aggtgtttaa ccttgagagg ccagagaaca aagcbgtgtg cctggtccta |
| 257341 | taccactggg ttacagcaca cagtccagga gtgctgagct gagcccaggt cccctgaaat |
| 257401 | cagccagaaa tgaagccagt tgactagacc taacttatat cacagtcaaa acctcaaagg |
| 257461 | catcaaagaa ttgcaacttt aaagattaaa gaaacatcag ctcacacaga tgagaaaaaa |
| 257521 | ccagcaaaag aactggggca actcaaaaag ccggagtgtg ttctcacttc caaatgacca |
| 257581 | tgctagctcc ccagcaatgg ttcttaatca gactgagatg gctgaaatga cagacataga |
| 257641 | attcagagtc tggatggcaa tgaagattgt tgagatttag taggaagtta aaacccaata |
| 257701 | cgatgaacct aagaatccag taaaacaata caagagctga aagacaaaat agtcatttta |
| 257761 | agaaccaagc tgatctgata gagctgaaaa ccccattaca ataatttcat aatacaattg |
| 257821 | gaagtatcag gagcagaaca gcccaagctg aggaaagaat ctcagagctc aaaagtggtt |
| 257881 | cttcaaattg actcagtcag acaagaataa aaaagaaaga ataaaaagga atgaacaaag |
| 257941 | cctccaagaa atacagaatt atgtaaaaag accaatccta tgactcactg acatccctga |
| 258001 | aagagagggg gagagagaaa gcaagttaga caacatattt gagggtactg cctatgaaaa |
| 258061 | tttccccatc ctcactagag aggtcaacat tcagattcag aaaattcaga gaacccctgc |
| 258121 | aagatcctat aaaagatgac catccccaag acacatagcc cacagattct ttaaggtcaa |
| 258181 | tgcaaaagaa aaaatattaa aggcagctgg agagaaggga aagacatcta taaaaagaac |
| 258241 | ccatcacact aatggcagac ctttcagcag aagcagtaca accaagaaga gattagggcc |
| 258301 | tatattcacc atcctaaaag aaaagaaatt tcaactaaga atttcatatc gagcctaact |
| 258361 | aagcttcata agcaaaggag aaataaaatc cttttcagac atgcaaatgc taaaggaatt |
| 258421 | cattactatc acacttgcct tacaagaggt ccttaaggaa gtgctaacat ggaaataaaa |
| 258481 | aactgttacc aactaccaca aaaacacaca taagtacata gaccactgac actataaagc |
| 258541 | aactacacaa tcaagtccac ataacaacca actaacaaca ctatgacagg atcaaatctt |
| 258601 | cacatatgaa tattaacctt aaatgtaaac gggctaaatg ccacattcaa aaggcacaga |
| 258661 | atggcaagtt ggatcaagaa gcaagaacca actgtatgtt gtcttcaagg gacccatctc |
| 258721 | acatgcagtg acacccacag gctcaaaata aagagattga taaaaatcca tcaagccata |
| 258781 | aagagattga taaaaatcta tcaagccata aagaaattga taaaaatcta tcaagcaaac |
| 258841 | agaaaacaaa aagagaagag cctgttattt ttattttaaa ccaaacagac tttaacctaa |
| 258901 | caataatcaa aaagggacaa agaagaggat tacataaaga taaaagattc aattcagcaa |
| 258961 | gaagacttaa ctgtcctaaa tgtatatgta cccaacactg gaacacccag gttcataaaa |
| 259021 | taagttcttg acccacaaaa agacttagat aactacacaa taatagcaag agagttctgc |
| 259081 | accttactga cagtattaga cagattattg aggcagaaaa ctaacaaagg tatttgggac |
| 259141 | ctgaactcaa cacatgacca aatggaccta acagacatct acagaacact ccacccaaca |
| 259201 | acaacagaat atacattctt cttatctgca aatgacacaa actataaaat caaccacatg |
| 259261 | ctcactcata aagcaattct cagcaaatta agaaaaactg aagtcacacc aacaacattc |
| 259321 | ttggatcaca gtgcaataaa aatagaaatc aataccaaga ggatctctaa aaatcacatg |
| 259381 | attacatgga aattaaatag cctgctcctg aatgactttt gggtaaacaa tgaaattaag |
| 259441 | gcaaaaatta agaaattatt tgaaactagt gagaacaaag acatgacata ccagaatctt |
| 259501 | tgggacccag ttaaagcagt ttaaaaggga agttatagca ctaaacaccc acatcaaaaa |
| 259561 | gttagaaaga tctcaaatta acaacttaac atcacatgta gagaaaccag agaaacaaga |
| 259621 | gcacaccaac cccaaagcta gcagaagata agaaataacc aaaatcagac ctgaactgaa |
| 259681 | tgaaattgag acacaaaaag ccatacaaaa ggtacataaa tccaagagtt gtctatttga |
| 259741 | aagtataaat aagattgata gaccactagc tagattaata aagaaaaaag aagattcaaa |
| 259801 | taaacacaat cagaaatgac aaaagggaca ttaccaacaa ctcaaaagaa acacaaaaaa |
| 259861 | ccctcagaga ttattacaaa cacctctatg cacacaaact agaacactta gaagaaatgg |
| 259921 | ataaattcct gaaaacatat aacctcccaa gattgaacca ggaagaaatt gaaaccctga |
| 259981 | acagaccaat aacaaattct agaattgaat cagtaataaa aagcctatca accagaaaaa |
| 260041 | gtcctggacc agacaaattc acagccaaat tctaccagat gtataaagaa gagttggtgc |
| 260101 | caatcctact gaaactattt caaaaacttg aggaggaggg atgcctcttt aactcattcc |
| 260161 | atgagaccag catcattctg ataccaaatc ctggcagaga cacaatgaga aaataaaact |
| 260221 | tcaggccaat atccttgata aacatacatg caaaaatcct caacaaaata atagcaaacc |
| 260281 | aaatccacca gcactcccaa aagtaattta ccatgatcaa gtaggcttta ttcctgggat |
| 260341 | gcaaggttgg ttcaacatac acaaataaat aaatgtgatt tatcacataa acagaatgaa |
| 260401 | aaacagaaac tacgtgatca tctcaataga cgcagaaaag gctttggata aaattcaaca |
| 260461 | tcctttcatg ttaaaaactc tgaacaaact aggcattgaa ggaacatacc tcaaaataat |
| 260521 | gagccatcta tgttaaactc acagccaaca tcatactgaa caggcaaaag ctggaagcat |
| 260581 | tatccttgag aactggaaca agacaaggat acccaccctc actattctta ttcaacatag |
| 260641 | tacgggaagt cctagccaga gcaattaggc aagagaaaga aataaaaggc acgcaaatag |
| 260701 | gaagagagga agtcaaacta tctctctttg tggacaatat aattctaaac ctagaaaacc |
| 260761 | acatagtctc tgcccaaagg ttcctagatc tgataaataa cttctgcaaa gtttcagaat |
| 260821 | aaaaaaccaa tgtacatttc tatacagcaa tattgtccaa gccaaaccag gaatgcaatt |
| 260881 | tcattcataa tagccacaaa aagaatataa tatctaggaa tatagctaac cagggaggtg |
| 260941 | aaagatctct acaatgagaa ttacagaaca tagcttaaag aaatcagaaa tgacacaaac |
| 261001 | aaatggaaaa attccatgct catagatggg aagaattaat attgttaaaa tggccatatt |
| 261061 | acccaaaaca ctttacagat tcaatgctat tcctatcaaa atacaaataa cagtttttag |
| 261121 | agttagaaga aactatttaa cattcatatg gaacccaaac accctgaata tccaaagcta |
| 261181 | tcacaagcta aaaattaaaa aaaatttaaa aagctggagg catcagaatc acactacctg |
| 261241 | acttcagact atgctacaag gctacagtaa ctaaaatctc atgatactga tagaaaaaca |
| 261301 | ggcacataga ccgtattagt cagggctctc tagagagaca gaactaatag gagatatata |
| 261361 | tatatatatg ggagcttatt agggagaaag gctcacatga tcacaaggtg aagtttcgtg |
| 261421 | ttaggccgtc tgcaagctga ggaaggaaga agccaagagt ggctcagtct gagtccaaaa |
| 261481 | gcctctaaaa cagggaaacc gacagtgtag ccttcaatct gtggctgaag gcctgagagc |
| 261541 | ccctggcaaa ccactggtgt aagtcccaga gtccagatgc tgaagaacct ggagtctgat |
| 261601 | atccaagagc aggaggatga aaggaagcat ctagtacagc aaaaagatga aagccagaag |
| 261661 | actcagcaag ccagcttacc ccactttctt ccacctcctt tgttttagcc actgtggcag |
| 261721 | ctgattagat gatgcccacc cacattaagg gtgggtcttc ccctcccagt ccactgactc |
| 261781 | aactgtcagt ctcctctggc aacaccttca cagacacacc aagaaacaat attttaccag |
| 261841 | ctatctaggc atccttcaat ccaatcaagt tgacacctaa tattaaccac cacatagacc |
| 261901 | aatggaataa gttagagaat ctagaaataa agctgcacat gtacaagaac ctgatttttg |
| 261961 | acaaagttaa caaaaacaag caatggggaa aggactccct gggtcataca cagcattgga |
| 262021 | ataactggat agccctatcc agaagatcaa agctggactc tttcctttca ccagatacaa |
| 262081 | aaatcaactc aaggtgggtt aaagacttaa atgtaaaatc gaaaactata aatttttagt |
| 262141 | ttttaaaact aatctataaa aactcttgaa gaaatcctag gaaatactat tctggatatc |
| 262201 | ggccctggca aatccttcat taagaagact ccaaaagcaa ttgcaataaa aaccaaaatt |
| 262261 | gataggtggg acctaattaa actaaagaac ttctgcacag caaaagaatt tatcaacaga |
| 262321 | ctaaacagac aaccaacaga atgagaaaaa tatttgcaaa ctatgcatcc aagaaaagtc |
| 262381 | taatatccag aatctataag gaacttaaac taaccagcaa aaacaaaaca aaacaaaacc |
| 262441 | ctaaaaaacc attaaaatgg gcaaaagaca tgaacagaca cttctcaaaa gaaggcacac |
| 262501 | acggccatta agcatataaa gaattactca acattactaa tcattagaga aatgcaaagt |
| 262561 | aaagccacaa tgagatacta tctcacacca gtcaaaatga ctattgttaa aaacaaacaa |
| 262621 | acaaacaaac aaacaaaaaa cagatgctgg catgactgtg gagaaaaggg aacacttaga |
| 262681 | tgctgttggt gggaatgtaa attagttcag ccactgtggc aagcaatttg aaaatttctc |
| 262741 | aaagaactca aaacagaact accatttagc caagcaatcc aattactggg taaatatcaa |
| 262801 | aggagtagaa atcattgtac tataaagaca catgtactca tatgttcacc acagcactat |
| 262861 | tcaaaacagc aaaaacatgg catcaaccta gatgtccgtc aacagtgtac tggatgaaga |
| 262921 | aaatgtagta tatatacacc atgcaatgct atgcagccat aaaaaagaat taaattatgt |
| 262981 | ctttgcagca acattgatga agctggaggc cattatccta agtgaattaa tgcaggaaca |
| 263041 | gaaaaccaaa taacctcata ttctcacttg taaatggaag ctaaacattg agtacacatg |
| 263101 | gatgcaaaga agagaacaat agacaccagg gcctatgtga gggtggagag tgggagcaag |
| 263161 | gtgaggattg aaaaactacc tattggttac tacgctcatc atctgagtaa tgaaataatt |
| 263221 | gatacaccaa acccccacaa catgcaattt acccatgtaa gcaacctgca catgcattcc |
| 263281 | ctgaacctaa aataaaaatt agaaagaaaa aaataataat taaaaaaatt atctggggga |
| 263341 | aaaataattt acattagtag caccctcttg tcttcagggg atatgttcta agacccccag |
| 263401 | tggatgccta aaactaagga tagcaaattc tattgcbgtc agttggaaca tgtttctttt |
| 263461 | catgtcttca gtccacatat ttaatgactt ttccacttta actaaatttt aatcacacac |
| 263521 | tgtgaccatc acttttacag tttgaggtac aacagcaaaa ctatcattaa tttctttttt |
| 263581 | cttcttcaca atttcatgga tagaagattt gttcttactg tagatcttag caacctcagt |
| 263641 | gtatgatttt cttttccttc cttattaggt caaaaacttt tgccttttca cttaaaggaa |
| 263701 | gcactttaag tcttatctgt ggcatatctg aattgccagc atcactgctc ttgcactttg |
| 263761 | agagtattac atgaaataag ggttacttga acccaagcat tgccttactg taatagtaag |
| 263821 | tctgataact gagaggacta ttaacaacat gggtatacta ttgtatccac aggatgcatc |
| 263881 | cacactaaac aaagggagaa ttcacatcct gggcagggtg aagtgggaag gtgaggaatt |
| 263941 | tcatcacagt actcgaaaca tcataaaact taaaacatga attgtttatt tctagaattt |
| 264001 | tccatttaat atttttggaa ccatgaattg atcacaagta actaaaacca tggaaaagag |
| 264061 | agaactagtc cacatgttgt ttagtatcgc tattacagta attttctttt tcttgtgtgg |
| 264121 | tcttatcctg tgggcttcta gaaaattgtt tcctacctgc ctctcaatcc ccttcctctt |
| 264181 | ctcaactttc attttagcag aggctacatt atagtgaccc tgttggttta ggatttaaag |
| 264241 | aggcatttat ttgatttgtt aaaaacctcc acatgcaccc atgaaataac caaatgacct |
| 264301 | cagggtataa atggagctgc aaacttgtcc aagtcaagaa attcagtata aaaaccttag |
| 264361 | gcaggccagg cgcggtggct cacgcctgta atcctagcac tttgggaggc cgaggtgggt |
| 264421 | ggatcacgag gcagaatatc gagacaatcc tggctaacat ggtgaaacct cgtctctact |
| 264481 | aaaaatacaa aaaattagcc aggcatggtg gcgggcgcct gtagtcccag ctactcagga |
| 264541 | ggctgaggca ggagaatggc gtgatcccgg gaggcggagc ttgcattgag ccgagatcgc |
| 264601 | gccactgcac tctagcctgg gcgacagaga agactcctcc tcaaacaaaa acaaaacaaa |
| 264661 | aacaaaaaca aaacaaacaa aaagaaacac cttaggcaac aacatatatg ctagaattgc |
| 264721 | ctttgctaac tcccctggca aagcaaatga tgtattgaga ttgcttctca gataaggtgg |
| 264781 | ttgaaaatga tagcaatctt aaaaaatgag cagttttcat aaatttgtat acattttgct |
| 264841 | ctatagacaa agagtagagc ttatagctat catggccata tctcaataaa aatgtgttgc |
| 264901 | aagcaggttt gccttgggca tctttcctta ttcctttcag tattccactt cttttcacac |
| 264961 | cctttcccac atgttagatg ttcccagtct gctcattcag ttcgggctcc cttccctggg |
| 265021 | aggcbgtctt cagctcaaaa ctttgccagt gataaaactc cattcaaaac ttatctgcca |
| 265081 | agtggccatt tttacttgaa gccctgccct tggtcaatga cagtgcaaaa actggatagt |
| 265141 | ggcatattaa tcaaataagt cattttctcc ctaggttaaa ccatagggaa tatctgcttt |
| 265201 | caaccctttt ggcctccaaa aaaaaaaaaa aaagcatttt gtatggcttt tcatacctca |
| 265261 | tggtgtccta gcttgagcac tggagcaaag tcagaaaatc tgagcccttg acttatctct |
| 265321 | gtggttcact gctggataat gtccagaaaa ttatttcatg cctttgagct tcagcttcct |
| 265381 | tatctgtaaa aaggagagta actaccttga cttcttgctg agattttaaa gagaacaaat |
| 265441 | gtgaaagcac acacaatcac catttgcaaa gggtaaagtg gtagatggat gaaaggaata |
| 265501 | atgatctgta atttttcctt acatgctagc ctatttaaaa tgtatgagcc tccatgataa |
| 265561 | gtgtggctaa tagtggggga atgtagatga tctagagata ccggtcaacc tacaatgtca |
| 265621 | gctttatgtc attgtgcccc tttcttcttt ggggtttata tgactataat attttaaaaa |
| 265681 | ccaaaacctt atgggaccat tttataattt gtgtcatatg aaattttaat tttgctattt |
| 265741 | atagtgaaag ggaaaaaagg aagtggagta tataggatat agatctctaa ccactaaaat |
| 265801 | aaacctgtga gtaaatgcat tttaagctct tcatgcaaat acatatatat atatatatac |
| 265861 | acacatatat atacacacac acacatataa ttactgatta aaaatatata taaaatcaca |
| 265921 | tatatataca tataaaacca cttggcattc aggttgtata aaaatgttga tttttattca |
| 265981 | agaattgtag agtagatgga aatttaatgt actcaatgta atctctattt gggatgagat |
| 266041 | tctaggggga attaaaattt acataggagt ttctttgcct ggtttagtcc atccagaggc |
| 266101 | ttcagatggt ctgggaacca actaaagttg tgtggagcaa tgtaaaagtc agtatatatg |
| 266161 | tttcttttcc cctggggagg gattcaatag atttcatcgt attcttaaag aaattcttgt |
| 266221 | cctaccaaag gttaagaact aattatctca gttaaacaaa acacataaaa atatgttttt |
| 266281 | atatacatgt tgaattattc aaatcttcag tgcttagtag tttattaatc ttgaaggcct |
| 266341 | agaaagtgaa taatttcaac aactgaacaa aaataaaatt taaaaagaaa ctattttctg |
| 266401 | gtcattagaa caaacttgtt ataaaatata tgtctttttg ctattgcttc tccacttcaa |
| 266461 | cactcatgat catgttttgt tgctatttcc cctatctcat tttttctggc tgctgggtta |
| 266521 | aacttcctgt ttttgcagaa tgaccaaaaa cattggtgat gatggaggtg gagatgacaa |
| 266581 | cactttcaat ttcagctgga aggtctttac cagcbgggac tacctgatcg gcaatcctga |
| 266641 | aacagcagac aacaaattta attctatcac aatgaacttt aaggtagagg caccaacttc |
| 266701 | aaaaacctgc tgtttgtatt tctaagagta aaattggagg cattccatct ggtccagtag |
| 266761 | tgcagtatct tgacaattta catgaaagat taactcatgg tttctgccta ccaagatctt |
| 266821 | gccatggttc tgattataac tggaaaatct tccatgaccc acaacagcac tattattcct |
| 266881 | taaacacttc tcttctctaa atctggtaat aaaataatgt tactggattg aaataggacc |
| 266941 | atgagtaatc agaataagat attttaaaaa ctagaacaat gttcactaat tatttacagg |
| 267001 | aataagcata atattgaagt gaccctaaaa cattattttg tagttttttt tttaattcac |
| 267061 | tggaatgaag atttttagag tgaagactat cctaatatca gagcaatcac agtttgtttg |
| 267121 | caagaattct tccttctgtc ttacttgcca tcgtttgttg gcaatattca cctggtttgt |
| 267181 | ggaatctcag atttagttta cattgtcatt cctcacattc tgatgattgt aaaaataact |
| 267241 | tttgaggttt tgatactttt aaaatgtagc taagatattc tattttgggt ttttgtttgt |
| 267301 | ttgtttgttt tcatggatac aggaagctat cacagaagaa aaagcagccc aagtagaaga |
| 267361 | aaacgtccac ttgatcagat tcctgaggtt tctggctaac ttcttcgtgt ttctaacact |
| 267421 | tggagggagt ggatacctca tcttttgggc tgtgaagcga tcccaggaat ttgcacagca |
| 267481 | agatcctgac acccttgggt ggtgggaaaa aaatgaagtt cgtctctgca tgctttttat |
| 267541 | gtgcttagaa cctgacattt gtttcttttg tgggttatgt ttctttgatg gaacatttaa |
| 267601 | aaaggccacc ctttacctat cccctatcct gcccttacag ttaaccaacc ctgttgctca |
| 267661 | ttttccattc tattctagtc ttatttctaa atctggactg tctgtttttc attttgtgac |
| 267721 | atgatggaaa gttagagtca gaaaagatat taaaaaacac atagtctaat cattatgttt |
| 267781 | tacagatggg aatgataaat ctcaagagat tgcattatat gtttatggtc acagagttag |
| 267841 | gagaagagtc agggtgagaa cctaggaatc ttgacttcga gtccaaggct cttgctgctt |
| 267901 | tctctgcaaa tccttcatct gtcattaaaa gatcaaattg ttgcctgaac tttttgaagc |
| 267961 | agccatgata aagccactga ttcctatgtt gatctcactg gaaacactca gattgcttct |
| 268021 | ccacctttgg gcatgtctgg gcttccctct gttttcatta gaagcctaac tgcagcatct |
| 268081 | ccatctccat ttcctcctgt cctgtacctt actttctctc cctctaaatg ctattcaaat |
| 268141 | gaagaaggcc agctcttttc caggaattaa acattatgac cgtaatttgc ctttagagta |
| 268201 | tctgcccatt tagtgaatca gagaaaggag gttagacata gatcatttag aatcagaaaa |
| 268261 | tcattggtca tgagttgttg ctagagtctg ttcccgttca taaaatgctt atgtgtatga |
| 268321 | tgtgacgtca ttttgagctt gggcattttc aaagtatgtg cagatttagg ctgtgggaag |
| 268381 | tgtagacttc ccacactgaa acttttgcag aacagtatag atcaaaagaa ttaaaatatg |
| 268441 | tctttataag catagaattt tctaaaaaat cttggacagc aaatgatata atctacttac |
| 268501 | agaaaaaggt tccaaataac attctgagta tttcagaagt ggtaccaata gagacgggac |
| 268561 | tagatatttt aaagacttta atatacagtc atgtcataaa aacttgtaaa atataagtaa |
| 268621 | tttagcagag ggcttttatt tatttaaaat gaaaaatgta ggaacacctc aaagcattta |
| 268681 | ctaagtttgc tttcaaaatg gtctcataat tgtaatagta catagaggta acattatcat |
| 268741 | gcagctttgg tccattattt atattggtta tgtttttgta taaataaacc atattaaagg |
| 268801 | atgggtagtt gattatcaat aaaataacta ttctttgtaa gaacctcttt aacatatatt |
| 268861 | ttagggaccc tctgagtcct aggggccaat gaaggtaata atggagattc atgagtaact |
| 268921 | ttacaaattt gataaaacca aatttaaatt tgccttgcat aagtttgcac aggataagcc |
| 268981 | aaattttctt tacattagtc taaaattata gcatgctgat tttgtattat gtcatgctga |
| 269041 | gatttggatc ctgttggtca tacttatata atgttttaat aaaaatgaca aaaatctaat |
| 269101 | agcaattgtt ttctaaatat agtctggtag ttattataat tattcacacc acgaagtcca |
| 269161 | caggagaaaa taggaaatgt ttagtggtga cagtttgagc cgggtatttg ggaaaggaga |
| 269221 | tagtcaccag agttacctaa aatcggtatt tccctattag aaaattagta catgttttgg |
| 269281 | attcttttta ttgacttcct ttagccaaat aatatcatca taaggttgcc aaacatccag |
| 269341 | gaaataaaaa gcacatgttt cctacttttc atgtttctat tccttcttct ttctctctcc |
| 269401 | cccctctccc cacccctgca ttattctctt gtctctgaaa ttatagccca ttctttcact |
| 269461 | tttgaaactt ttctacgttg gcttccataa cattatgtca tgtgttctcc atttgtttct |
| 269521 | ctgagttcct tctgtttcct ttaataaaac tcattgtatg tgtttatgtt ttcggcctta |
| 269581 | aaagtttaca tttgccaaaa ttcaatattt aggcctaggc ccatctcagg gaattcatcc |
| 269641 | attctaactg attaaactag cccatatgct gatgattgtc agattagaat tttcagtttg |
| 269701 | aacctcctcc tcaagcagat tattttccat ttcttttgga aatcttgttg tgaagtgcat |
| 269761 | caccatatca gaatcagtta ccacatagaa caatatgtgt tctctgtgta gagactgatg |
| 269821 | taaattgcca ccttcactat accaggaaac agactgttac tactggcaca tacacacact |
| 269881 | cagtcacatg cctctcttga gaatgtgaat tgaatatttt ccctgtcatt ttattgagat |
| 269941 | caaattctaa acgtgcataa aatagtcatt tttagtctta aaaaagatca aagaagccta |
| 270001 | gctcagaatc ttccaaaatt ctggcaaaaa gcaataataa ctttaaacac cattaaccta |
| 270061 | gtttctccct tgtgcctcct tgtagatgaa catggttatg tccctcctag ggatgttctg |
| 270121 | tccaacattg tttgacttat ttgctgaatt agaagactac catcctctca tcgctttgaa |
| 270181 | atggctactg ggacgcattt ttgctcttct tttaggcaat ttatacgtat ttattcttgc |
| 270241 | attaatggat gagattaaca acaaggtaag ccttgtttct ggattgtcct tgccataaga |
| 270301 | gtgttgttca attcccagtc tcaagtttgc cagaaatgcc tttgaaatct ctgttgtctt |
| 270361 | cattttagtt tctatctctt tgctttctag attgaagagg agaagctagt aaaggccaat |
| 270421 | attacccttt gggaagccaa tatgatcaag gcctacaatg catcattctc tgaaaatagc |
| 270481 | actggaccac ccttttttgt tcaccctgca gatgtacctc gaggaccttg ctgggaaaca |
| 270541 | atggtgggac aggtaatgcc accaacagaa gtgtatggca attagtagat taaaaaaaga |
| 270601 | gagtcaatat ctcttccata agattggctt ttaaaaaatt gcttattagt aaaaatagct |
| 270661 | aagatttgtt gaatgttgac tgtgtgctgg ctctgaattt catgtatatt atctcacact |
| 270721 | gtttgcaaat ctatcccttg aggtaaatac tatttgtatg tcccctttac agttgcatat |
| 270781 | aaaggaagga tagttgaaaa tggtgcaaag agatgtttac tatctgtatt ataataaagc |
| 270841 | actcgattta gatacaggcc aaagcaaata tttaaatgga actctattta gtgttacttg |
| 270901 | tttgctgtaa aacaaaacaa aacaaaacaa acaaacaaac aaaaacagag tcttgggggt |
| 270961 | ggccaagaca gccaactaga ggcagctagt gtgcatggct ctcatggaga gaaatagagg |
| 271021 | ggttgagtaa atatagcacc ttcaaccgaa acatccaggt acatgcattg gatctaatca |
| 271081 | aggaaacaac ttgacccatg gagagcagag aaaagcaagg cagggtgaca gcccacctgg |
| 271141 | tagtgacatg aagccaaggg atccttctat gcccagggaa gtggtgagtg aatgcacgac |
| 271201 | cttgggaacc catacttctc ccgtggatct ttggaaccct tgtgtcagga gatatcctca |
| 271261 | tgaacccact ccacctgggc cttcagtccg acacacagag ctatgtggag tctcagcaga |
| 271321 | gcagccactt aagcacatgc agagacccgg gagccttaga tacctgggct tttctttttg |
| 271381 | ggcttcctgt caaaagtagc tatacctctg gcaaagcagg aggttagacc cccaaccaca |
| 271441 | ccccttagaa aaggggctga atccagtgac agtctgcagg ccccacttca cagcacctca |
| 271501 | cagaatgaaa cccactggct tggaactcca gccagttacc ggtagaaatg ttgcacctcc |
| 271561 | ctgagacaga gctcctgggg gaaagtgtgg gccatcatct ttgctgtttg gttgacttgg |
| 271621 | ccattccatc attcaggctt cagagagtcc aagccaacca gcggctgaag cagaccctga |
| 271681 | gcacagcata gcbgttctat gaaaatgtgg ctagactact ttttcaaatg ggtctcctat |
| 271741 | ccctttcctc ctcactgggt aggacctcct aactggggtc tccaaccacc tcctacaggt |
| 271801 | gcgtttgggc cagcaacggg tctgtacatt tctgggatgg agcttccaga ggtgggggca |
| 271861 | ggctgccatc tttgctgttt cacagccttc actgttgcta cctccagata ataaaacatc |
| 271921 | tgaggtgacc agggacggat gtggggtccc aatatactgc agcagcccta tgaaaaagtg |
| 271981 | accagacttt tacatgggtg cccatcccca tatcggctca ccagacacat cctccaggcc |
| 272041 | taggcctcca gctaccctct gctagaatta tcgatcaagt agcagctctg taactccctg |
| 272101 | gacaggatcc ccaggggcaa ctgaaagttc ctctgccact acctctgcag tagaactgcc |
| 272161 | cttgctaccc ttggactaac aaaggaacaa agaccctaag cgcctcatcc atacctccaa |
| 272221 | taagctgcag ttgactccag gagagaaggc cagtctgtct ctcacaggtc ctacctaccc |
| 272281 | ccacccccct ccttgtcacc agacagggaa cccccagctc ggacccacaa catagaacat |
| 272341 | ccatcctggg ctaattgcaa ggagtaattg ctgacctgca tctcaatggg gtggagcccc |
| 272401 | caggagataa gcaaaagacc cttggccata accatgccaa ggtatcttcc tctgctgctg |
| 272461 | ccaagttgga gaagaaacat aacgctgaga ttgccccaga gctgaagggg cagcccagga |
| 272521 | gtgccaagcc gtaatctaca gccagctctc aagggggaaa gaaatctaca ctttcagagc |
| 272581 | attgagaggg aacatggctg caactgtgcg gcaacacagg ggagcctcac aaccaagcaa |
| 272641 | gagtctacca actgaccaat atgccgaagt gccacctact ggatcacatt ccccaaagca |
| 272701 | tcaacaccaa aaatatctca ctaacatacc cccctctgaa accaaagaca agtactcagc |
| 272761 | ttcaaataaa gaccctgtgc aaagccttgg cccaatgaaa acttccagga aagatgccta |
| 272821 | ttgactgtat tcaatctaca ttgcagttaa aggaacacct acacactgag atgagaaaga |
| 272881 | accaatgcaa gaactctggt aactcaaatg accagagtat tgtatgtcct ccaaacaacc |
| 272941 | acaccagttc tccaacaaga gttcttaacg aggctgagct agctgaaatg actgaaatag |
| 273001 | aattcagact gtggagagga atgaagatca ttgagattca gaagaatggc aaaacccaat |
| 273061 | ccaaggaaaa taagaatcac aataacacga cactggagct gaaggacaaa gtagctgtta |
| 273121 | taaaaaagaa gctaataggt ctcataaggc tgaataacac aatacaggaa tttcacaatg |
| 273181 | caatcacaag cattaacagt agaataaacc aagctgagga aagaatctta gaacttgaag |
| 273241 | actggctctc tgaaataaga cagtcagata aaaataaagg aaaaagaata aaacgggaag |
| 273301 | aacaaaacct ccaagaagta tgggattatg taaatgccaa agctatgaat cactggcatc |
| 273361 | cctgaaaggg atggggaaaa agcaaacaac ttggaaaaca tattttagga tattatccat |
| 273421 | gaaaacttcc ccaaccttac tagagaggca aatttgctgc cagtctttgc taacagtcaa |
| 273481 | atttaggaaa tacagagaat tcctgcaaga ttctacacag gaagatcatc cccaaaacac |
| 273541 | acaattgtca ggttttctca ggtcaaaatg aaaaaatgtt aaagacagcc agagagaaag |
| 273601 | ggcaggtcac ctacagagag aacaccatta ggctaacagc agatgtctca gctgaaaccc |
| 273661 | tacaagccag aagcagtcag ggtcctatat tcaacattct taaagaaaaa aaatcttcaa |
| 273721 | ccaagaattt catatcaggc caaactaagc ttcctaagca aaggagaaat aagataattt |
| 273781 | ttgggcaagc aaatgttgag ggagtttgtt accaccagac ctgctttaca agacatcttg |
| 273841 | aaaggagcac taaatggagt aaggaaagac tatttgcagc taatacaaaa gcatacttaa |
| 273901 | atacacagac cagtgacact gtaaagcaac catacaaaca agccagcata ataatcagtg |
| 273961 | aacaacacaa tgacaggatt aaatccatac atattaatac taatcttgaa tgtaaatggg |
| 274021 | ctaaatgctc catttaaaag gcacagagta gcaagctgta ttaaaaaaaa agcaagaccc |
| 274081 | aatggtatgc tgtcttcaag agacccatct catgcttaat aacacccaca cgctaaaaat |
| 274141 | aaagggatgg aagaaaatct accaaccaag agaaaacaga aaaaaacatg ggttattgaa |
| 274201 | attaaaattc ccaatttcaa aaaaaaaatg caaaaaacaa aacacacaca tgcacacaca |
| 274261 | aatacacttc aaaccaacaa agataaaaaa aaggcaaaga agggcattac ataatggtaa |
| 274321 | agggttcaat gcaacaagaa gacctaacta tcctaaatat atatgcactc aatacaagag |
| 274381 | tacccagatt cataaagcaa gttcttagag acctacaaag agacataggc taccaccacc |
| 274441 | caataatagc ccaggccctg atgaattcac agctgaattc taccagatgt acaaagaaga |
| 274501 | actggtaaca ttcctactga agctatttca cgaaattgag gaggaggagg aacttcttcc |
| 274561 | cagctcatcc tatgaggcca gtatcattct gctaccaaaa cctggcagag acacaacaaa |
| 274621 | aaaagaaatc ttcaggccaa tatcatgagg cccatcaatt caaaaatctt caacaaaata |
| 274681 | cttgcaaacc gaattcagca gcacatcaaa tggctaatcc accacaatca agtaggcgtc |
| 274741 | atccttggga tggaaggtta gttcaacata tgcaaaacaa taaatgtgat tcatcatgta |
| 274801 | aaaagaaata aagagaaaaa ccacatgatt atctccatag atgcagaaaa agctttcaat |
| 274861 | aaaattcaac acccgttcat gttaaaaact ctcaataaac taggtattga aggaacatac |
| 274921 | ctcaaaataa taagagcctt ctatgacaaa cccacagcca aaatcataat gaacggacaa |
| 274981 | aagctgaaag cattcccctt gaaaaccagc acgagacaag gatgccctct ctcaccactc |
| 275041 | ctattcaaca tagtatttga agttctggcc agggcaatca ggcaagagaa agaaatgaag |
| 275101 | ggtatcaaaa taggaaaaga gggagtcaaa ttatctttgt ttgcagatga catgatccta |
| 275161 | tatctagaaa accccattac cccggcccaa aagcttctta agcggataag caacttcagc |
| 275221 | agtctcagga tatatcaatg tgcaaaattg ctcgcattct tatacaccaa caacaggcaa |
| 275281 | gcagagagcc aaatcatgaa tgaactcaca tctacaattg ctacaaagat aataaaatac |
| 275341 | ttaagaatgc agctaacaag ggaagtgaag gacctcttca tggagaacta caaactactg |
| 275401 | ctcaaggaaa tcagagagga cacacacaaa tgggaaaaca ttcaatgctc atacatggga |
| 275461 | agaatcaatt ttgttaaaat ggccatactg cccaaagtaa tttatagatt caatgctatt |
| 275521 | cccattaaac cacaactgaa attcttcaca gaattagaaa aaaactattt taaaattcct |
| 275581 | atggaaccaa aaaagagctc gtatagccaa gacaatccaa agaaaaaaga ataaagctgg |
| 275641 | aggaatcaca ctacctgact tcaaactata ctacagggcc acagtactca aaacagcatg |
| 275701 | gtactggtgc aagaacagac acatagacca atggaacaga atagataact tagaaataaa |
| 275761 | accacacaac tacaaccatc tgatctttga caaacctgac aaaaacaagc aatggggaaa |
| 275821 | atatttccta tttaataaat gttactggga gaactggtag ccatatgcag aaaattgaaa |
| 275881 | ctggacctct tctttacacc atgtataaaa attaactcaa gatggattaa aggcttaaat |
| 275941 | gtaaaaccca aaactatgaa aactctagga gaaaatctag gcaatatcat tcaggacata |
| 276001 | ggcacaagca aagatttcat gacaaaaatg ccagaagcga ttgcagtgaa agcaaaaatt |
| 276061 | aacaaatggg atctaactaa actaaagagc tccagcacag caaaagaaac tatcatcaga |
| 276121 | gtgaacagac aacctacaga atgggagaac atttttgcaa tctatccatc tgacaaaggt |
| 276181 | ctaatatgca gagtctacaa ggaaattaaa caaatttaca agaaaaaaac tggatcccat |
| 276241 | taaaaagtgg gcaaaggaca tgaacagaca cttctcaaaa gaagacatac atgcggcaaa |
| 276301 | caagcatgtg aaataaaact tcatatcact gatcattaga gaaatgcaaa tcaaaaccac |
| 276361 | aatgggatac cagctctcac cagtcagagt gattagtagt aaaaagtgaa aaaataatat |
| 276421 | gctggcaagg tcgcagagaa aaaggaacat ttatacactg ttagtgggaa tgtaaaatag |
| 276481 | ttcaaccatt gtggaaagca gtatggcgat tcctcaaaga gctaaaagca gaactatcat |
| 276541 | tcaacccagt catcccatta ctgggtatat acccagaggt atataaatca taaagacaca |
| 276601 | ggcatgtgaa tgttcattgc agcactattc acaatagcaa atacacggaa tcaacctaaa |
| 276661 | tgtccatcaa tgacagattg gatagggaaa atgtgatata ccatggaata ttatgcagcc |
| 276721 | ataaaaaaga atgagatcat gtctgttgca gaaaaatgga tctattatcc ttagcaaact |
| 276781 | catgtaggaa caccaaatac tgcatgttct tacttatatg ggagctaaat tatgataact |
| 276841 | catgaacgca aagaaggaaa caacagacac tggggtctac ttgagggtgg agggtgagag |
| 276901 | gagggagaag agcagaaaag ataactattg ggtactgggt ttaatacctg ggtgataaaa |
| 276961 | taatctgtac aacaaactcc catgacacaa atttacctat gtaacaaagc ttcacatgta |
| 277021 | ctactaaacc taaaataaaa gttttttttt aatggataat ttggggagca cacactaaga |
| 277081 | aattttaata atgtcaattt ttgttaaata attttccctt aaaagaaaaa aaatactatt |
| 277141 | ttaagttatt tgttttcatg atgattttgt aaataacccc agcccaagac tagccatacc |
| 277201 | ttaccagaga aaagaaataa tgtttcatat ggctttctat cccttaaggg aaaccaagac |
| 277261 | aaataaaacc aaacaaaacc caagaaaaat ctacttcaga tctcgtattt ttatacaaat |
| 277321 | ccaatttata ttttgaaaag cttttatgat ttcatttagt tagaattgat attcctaacg |
| 277381 | tgcagtccat aaattgattt tggggcttca gattatcatt gagaacagct tttgtcataa |
| 277441 | agcttctgta tgttagacaa cagttgagtt tagcactgaa tgtagtgttt gtgaaattat |
| 277501 | ttgaacaatt ttttactgca ttatttggta agataacata aaaattgaag gactagcatt |
| 277561 | agtcttataa aattcatata atttaaacaa atatgtaaaa atatatctta ggcttcaatc |
| 277621 | agatgctcat caaacttaag ccaatcaaga tttcaactgt gaaagaaaaa aataagataa |
| 277681 | atgtgtaaaa tgctagacat gtatcattaa tgattgagta caaaaattat ggtataattg |
| 277741 | aaaattctat tttattttat ttgttaagct ttcgggaacc agataaatcc cccctttgat |
| 277801 | gatatatgct attaatttga ttttcagaca tgcacatttc atacaactta caggaacata |
| 277861 | ttacatatga aataataaaa tcaaagtcat ctgcacttaa tacaggagtg cttgtgattc |
| 277921 | aggatgtggt agacagaata atggccctct ataacagtac acattctaat ctctggaacg |
| 277981 | ataaatatgt tacatggcaa aatggacttt gcagatgaaa ttaagttaaa gatctcagct |
| 278041 | tgaaagaatt attgtggatt atgtgagcag gcttaatgaa atcataagga tctttataag |
| 278101 | caggagataa agggaaaaag tcagaaaatt gagatgtaac agcagaagca gaggttggaa |
| 278161 | tgatgtgctt taaagatgga ggaaggagat taagagccaa ggaatgcagg tggcctcaga |
| 278221 | aactgaaaaa gaaaggaaac atattctctt cccaagtctg cactttgaat ttagacttct |
| 278281 | gacttccaga actgtaagaa gataaatttg cattgtttta aaccactaca tttatggcaa |
| 278341 | tttgttacag caacaatagg aaatgagtac atcatggtac ttgggtctcc ctgttccatg |
| 278401 | gctttttgaa gtgaagtctg gttgtggtgc ttaacacgag tctgttttat cacaactaag |
| 278461 | ccgctcccta aatcttcagc atacgattca agaaaggaaa atataggaag tacagtttta |
| 278521 | gaaactgaag gaatttgaga cgttctcttc tgcacatcct agaacacagg ttggcctgaa |
| 278581 | agctaagaaa cctgcacttt aacaagcaaa aacatctact gaatgggatt aatagaatta |
| 278641 | gctgtaaaga gtaggatctg ggctggccac ttctggagtg aaggaatgga ttaattagat |
| 278701 | aggaatgcga atgcaatcta ggagaatatt catgtttcag atgcagatgg ttctgcgata |
| 278761 | gtcccacaca tactgactta aaagagaaga aataccattt agttaatcct ccaccttgga |
| 278821 | agcccgtgga ttatgctgct tgtctttttt tttttttaaa cctgtctgta gtgattttcc |
| 278881 | ttgcttcatc atattttctt actgccattt tagttggatt tcccccttat ctttcacctt |
| 278941 | cctttctcca aggaagcatt aagctctagt gggaaagtct gcagaagcgg gccaagggaa |
| 279001 | aaggggttgt ggttctgact ggaatgttga ttaggcagat ggaatctctg ggaacaaaaa |
| 279061 | gaacatatag gacataacaa atctgagtgc tggcaaggtc tggcctttaa gagatcaata |
| 279121 | tctgtatcca tgcatctaaa atttctattc tttaattgct taaaaaatat gcctccaaaa |
| 279181 | atagtaaagg cagctgctct gtatgtaatg ttagatatgc accctcattc attgttctat |
| 279241 | gagagcatta cagatgtttc ctcttctcct ccatggatac cctctgcttt gattttctcc |
| 279301 | aaggatgcta tgagactcaa agcacttatt gttttgaata taggataatg tgattgctcc |
| 279361 | tttacttctg cagattccca agcaatcatt tagtttcatc cccaatggat ttgataggtg |
| 279421 | ggcagcagag ccattcctct ttgaagctat atcctgaggt cttcactttg gggaagggga |
| 279481 | gaaagcaaca gctgaagata aaatggctaa tgtgccaagt atttcctcct caaattttta |
| 279541 | cgtttcattc tgagatacgt tatattatta tttccgtttt atagatgaga agactgagac |
| 279601 | ttaggtaatt tgctcaagat ctctgagaaa gtcaatgaca ggagccccag ttcagcctac |
| 279661 | atagtctgct tacagagttt gtgtctttgt tcacagtgct aaattgtccc ccagttagca |
| 279721 | tcaacacaca ctccccaaac tcctgcctgc aatgtctata tttggtggcc ttttatgatg |
| 279781 | ttccttgcct attgttttcc cttcacctat taataaatta tttctttagc tttattgatc |
| 279841 | aaagctgccc aggcatttta actaacatca cgtgtgcaaa gtttttaggt gtggagtgtg |
| 279901 | gggtttagca ggaggcctgt gtgggggctg tgctccccat cctgacaagc acacaaggaa |
| 279961 | ctaggatgat atccttgaga ttggctgggc taccattgtt tggattctct ttcttttaaa |
| 280021 | atatattttt cctatggtat atgaataaac atttaaaatt tttaatacaa tgtttgaatc |
| 280081 | ttcttcagat attttatgtg aaagttaggt cactgcttgg gaaggaatag aatttcaacc |
| 280141 | tttgggatga ggatgcttaa gaggatgtgg aggacttcca aaccactctg aaatgttttc |
| 280201 | ttacctgagg aagtcttcta gacctggcag tagaaaccta aaaatatccc tcatagcctt |
| 280261 | cctctaattg atgctagtta ttagaatctg agctcaacat tgcctggaaa gggtgggcat |
| 280321 | ggaggcatgt gtctgtagtc ccagctactc aggtggctga gacaggagga ttgcttgagt |
| 280381 | ccaggagttc caggtcagcc tgggcaacat agcaagaccc ctgtctctac atacatacat |
| 280441 | acatacatac atatatacat acatacatac atacatacat acatacaaag aactgcctta |
| 280501 | ggaaaggaaa ggagacaaag agtaggaagg agaaaaatta tgtccaaaaa taaccacagg |
| 280561 | aatactatca ttcattcatt ttttatttat gagtgtacag aaattgctgg gcattgtgtg |
| 280621 | attatataat tggaagtaaa acacttctca gcaaatgcaa aataactgaa atcataacaa |
| 280681 | acagtatctc agacaacaga acaattagat tagaaatcaa aattaagaaa ctcactcaaa |
| 280741 | accacacaac tacatggaaa ttgaacaatt tgctcctgaa cgactcctga gtaaataatg |
| 280801 | gaatgaaggc agaaatcaag atgttccttg aaactaatga gaataaagag accatgtacc |
| 280861 | agaatctctg ggacatactt gaaggaactc ttcaaggaga actacaaacc actgctcagt |
| 280921 | gaaatcagag aggacacaaa catatgtgaa aacattccat gctcatggat aggaaaaatc |
| 280981 | aatattgtga aaacggccat actgcccaaa ataatttata gattcaatgc tatttccatt |
| 281041 | aaaccaccat tgacattctt cacagaatta gaaaaaaaac atttttaaat tcatatggaa |
| 281101 | ccaaaaaaga gtccttataa ctgagaaaat ccaaagcaaa tagaacaaaa caggaggtgt |
| 281161 | cacactacct gacttcaaac catactacaa ggctatagta atcaaaacag catagtactg |
| 281221 | gtgcaaaaac aggcagacag accagtggaa cagaataggg aacacagaaa taagatcaca |
| 281281 | gacctacagt catctgatct ttgacaaact tgacaaaaac aagcaatggg gaaaggattc |
| 281341 | gctatttaat aaatgatgct aagaaaactg gctagcctat gcagaaaatt gaaatgggac |
| 281401 | cccgtctata caccttatac aaaaattaac ttaggatgga ttaaatgctt atatataaaa |
| 281461 | gccaaaacta taaaaaccat agaagaaaat ctaggcaata ccatttagga cataggcatg |
| 281521 | ggcaaagatt tcaagacgaa aacatcaaaa gcaattgcaa caaaaacaaa aattgacaaa |
| 281581 | tgggaactaa ttaaactaaa gagcttctgt acagcaaaag aaactctcat cagagtgaac |
| 281641 | agacaaccta cagaatggga gaaaattttt gcaatctatc catttgacaa agatctaata |
| 281701 | tccagaatct acaaagaact taaacaaatt tacgagaaaa aaacatacaa ccccattaaa |
| 281761 | aagtgggtga aggacatgaa cagacacttc tcaaagaaga gattcacgtg gccaacaacc |
| 281821 | atatgaaaaa acactcaaca tcactgatga ttagagaaat gcaaatcaaa accacaatga |
| 281881 | gataccatct cacaccagtc agaatggtga ttattaaaaa gtcaggaaac aacagatgct |
| 281941 | ggtgaggctg cagagagata ggaaggcttt tacacagtta gtgggaatgt aaattaattc |
| 282001 | aaacattgtg gaagacagtg tggcaattcc ttaaagacct agaaccagaa ataccatttg |
| 282061 | acccagcaat cccattactg ggtacatacc caaaggaaaa taaatcattc tgttacaaag |
| 282121 | atacatgccc acgtatattc attgcagcac tattcacaat agcagagaca tggaatcaat |
| 282181 | ccaaatgcct atcaatgata gactggataa agaaaatgtg ctatatgtac accatagaat |
| 282241 | actacgcagc aataaaaagg aatgagatca tgtcctttgc agagacatgg atggagctga |
| 282301 | aagccattat cctcagcaca ctaacacagg aacagaaaac caaacaccat atgttctcac |
| 282361 | tcataagtga gagctgaaca gtgagaaaac atggacacag ggaggggaac aacacacact |
| 282421 | ggagcctggt cgggggtaag ggagaaatga gaacatcagg aaaaatagct aatgattgca |
| 282481 | ggacttaata attaggtgat ggattgatag gtgcagcaaa ccaccatggc atgtgtttac |
| 282541 | ctatgtaata aaactgcacg tgtaccccag aacttaaaat aaaaaaagaa gacataaaaa |
| 282601 | atttaaaaaa atacacaatt caatggtttc taatatattc acatagttat gcatccagca |
| 282661 | tcacgatagc attttgtttt aggggcttac aatataccat tgtgcagaca tttaatttgt |
| 282721 | tttatttaat tagtctccca agcatattca aatttttccg tttttaatct ggaagaagca |
| 282781 | gtactttcat gattgtatgt atagatttgt gcacatgtgc aaatattgct gtcataggca |
| 282841 | tttctaaaag tggattttct tgatcaagct ccaaacactt taaaatgtga tggatcttaa |
| 282901 | caaatttctt cccaacgttg tgcccggttt aacttcccca tcagtttatg ctcatgctag |
| 282961 | ttcaccacac tcaccaatat gaagaagcat ggattttaca tttgtcattc gtgaggcaac |
| 283021 | aactcattgt tttcatttgt atttttatta tgtggggttt cggtattttt caattttaac |
| 283081 | ggaccgtttg tatatgttct tctgtgaatt tttaatttgt gacttttgct ggtttctttc |
| 283141 | tttattggat tgccaatcta tattcatact gatttgtaaa atcttttaat gtgttagcaa |
| 283201 | tactcaccct ctatcatata cgttgcaagc actttttcca catttgtctt tcaagtctgt |
| 283261 | aaatagtgct attcaccaca taaaatttta aactgctgtg tggccaatat tttcctgttt |
| 283321 | ttggctctcg tatcatgttt atgaaatttc tcagtaagaa gaaaactttt gatttagtaa |
| 283381 | acgggaaata attatttttt aagtaataaa gtcagggtga aatatttttt atttacttga |
| 283441 | tatgactagt tgttttcttc ttttgccatt aattgcagtc ttcaagccaa tacttcttta |
| 283501 | gaaatatgac agatttaata ccaacactag gaccatttga agacagaact gtgtgtttta |
| 283561 | atagagataa tatctcaaca ggagtttgtg aggctgacag tctctgatgt tctgaccacc |
| 283621 | tacgtcacaa tcctcattgg ggactttcta agggcatgtt ttgtgaggtt ttgcaattat |
| 283681 | tgcbggtgct gggacttgga gtatggatat gtaagtatga tgttaatttt gctttttttt |
| 283741 | ttttttaaat ttatttattt tttattgata attcttgggt gtttctcaca gagggggatt |
| 283801 | tggcagggtc ataggacaat agtggaggga aggtcagcag ataaacaagt gaacaaaggt |
| 283861 | ctctggtttt cctaggcaga ggaccctgcg gccttccgca gtgtttgtgt ccctgggtac |
| 283921 | ttgagattag ggagtggtga tgactcttaa ggagcatgct gccttcaagc atctgtttaa |
| 283981 | caaagcacat cttgcaccac ccttaatcca tttaaccctg agtggacaca gcacatgttt |
| 284041 | cagagagcac agggttgggg gcaaggtcac agatcaacag gatcccacgg cagaagaagt |
| 284101 | tttcttagta cagaacaaaa tgaaaagtct cccatgtcta cttctttcta cacagacacg |
| 284161 | gcaaccatcc gatttctcaa tcttttcccc acctttcccg cctttctatt ccacaaagcc |
| 284221 | gccattgtca tccgggccca ttctcaatga gctgttgggc acacctccca gacggggtgg |
| 284281 | tggccgggca gaggggctcc tcacttccca gtaggggcgg ccgggcagag gcgcccctca |
| 284341 | cctcccgggc ggggcggctg gccgggcggg gggctgaccc cccacctccc ctcccggacg |
| 284401 | gggcggctgg ccgggcaggg ggctgaccac cccacctccc tcccggatgg ggcggctggc |
| 284461 | cgggcagagg ggctcctcac ttcccagtag gggcagccgg gcagaggcgc ccctcacctc |
| 284521 | ctggacgggg cggctggccg ggtggggggc tgaccccccc acctccctcc cggacggggc |
| 284581 | ggctggccgg gcggggggct gacgccccca cctccctccc ggacggggtg gctgccgggc |
| 284641 | ggagacgctc ctcagttccc agactgggtg gctgccgggc ggagaggctc ctcatttctc |
| 284701 | agacggggcg gctgccgggc ggaggggctc ctcacttctc agacggggca gttgccgggc |
| 284761 | agagggtctc ctcacttctc agatggggcg gccgggcaga gatgctcctc acctcccaga |
| 284821 | cggggtcgca gccgggcaga ggtgctcctc acatcccaga tgatgggcgg ccgggcagag |
| 284881 | gcgctcctca cttcctagat gtgatggtgg ccgggaagag gtgctcctca cttcctaggt |
| 284941 | gggatggcgg ccgggcggag acgctcctca ctttccagac tgggcagcca ggcagagggg |
| 285001 | ctcctcacat cccagacgat gggcggccag gcagagacgc tcctcacttc ccagacgggg |
| 285061 | tggcagccga gcagaggctg caatctcggc actttgggag gccaaggcag gcggctggga |
| 285121 | ggtggaggtt gtagcgagcc gagatcacgc cactgcactc cagcctgggc accattgagc |
| 285181 | actgagtgaa cgagactccg tctgcaatcc cggcacctcg ggaggctgag gctggcggat |
| 285241 | cacttgcggt ttggggctgg agactggcct ggccaacaca gcgaaacccc gtctccacca |
| 285301 | aaaccagtca ggcgtgtcgg cgcgagcctg caatcgcagg cactcggcat gctcagtcag |
| 285361 | gagaatcagg cagggaggtt gcagtgagcc gagatggcag cagtacagtc cagcttcggc |
| 285421 | tcagcatgag agggagaccg tggaaagaga gggagaggga gaccatgggg agagggagag |
| 285481 | ggagtaattt tgcgcttata aggtttttcc tttgtaattc gtcatttaca cacactatat |
| 285541 | aagagaaagg catcatagag tttagtggat gggatcaccg ttttaggtgc aataaatgaa |
| 285601 | gaccaatgag tacatttata atgcagagaa gttcagactc gagtatcatg gtttacaata |
| 285661 | ttctagtaaa attagcacaa gatagcaaaa gcaatggacc tcaacttgtc agctgaaatg |
| 285721 | ttgaactcag taaatcttgg ccctgtagcc caccttctcc ctataagttt actagcattt |
| 285781 | ctagaagcag ggaaagatgg ctaatatcaa ctgcatattc tatttatgcc tttgaattct |
| 285841 | actaaactcc tggatactat catatgccag tcactgtgca gtagatgggg tggataaaag |
| 285901 | gatttgataa atatggtact tgcttcacaa agttcacagt ctaataagag ctcgaaagag |
| 285961 | acacacacaa gaggctgcag aaggttcaag gaaggcctag tttgctgtca tgcatctggc |
| 286021 | aagtggtgga gctgaattct ggcaggggcg gcttcttttc ctgaaacaat ggctcaggtc |
| 286081 | tctcagaacc acactggtgc tgactccatc accagctttc cttctatggt catcctcagg |
| 286141 | tcccccaaca aagtctgagg gcaacagcac actcatcacc ctgtgattag cacattgcct |
| 286201 | ggtttccact gtcctccttt gagtcaaact ggtctcagtc atcctggaaa atatgacctg |
| 286261 | gggggttggt agtactcatt tgcttaaaat cttccagtgg cttctcaagt acttagaatg |
| 286321 | atttccaaat ccctttctag gccttcagta ccctggatga tctgctcctt ttctttctct |
| 286381 | ctcaagtcat ttgctacctc ttttgctctt gctttgtaa gttcacatgg gcttcttttt |
| 286441 | atgctcaaac atgggctgct ttttatgctc aaacacaaga tggtccttgc atttgtaatt |
| 286501 | gctgtttctc ccgcaagggg tgctgttgcc ctagagctag gaatggctgg tttcttcttg |
| 286561 | tcattaaaga ctcagctatt atgttacctc cttagtgctc ttctctgacc acctattcta |
| 286621 | atgtagccaa tcaggcactg tttatatcaa cacactgttc tgttttcttc ataagatgtg |
| 286681 | catctatttg acattactct tgtaaaatgt actcatggtc tatctccctc tgttagaaag |
| 286741 | aatactctat gaaaatagag gccctgacct ctcttatttg aactgtgtga gtcacgtagc |
| 286801 | aggcagcatg tgttggctgg ctgtttgaat gttgaacctt ctcatttttg caccatcaag |
| 286861 | gcagcactgt ctattgccag aactctgcct ccttcgaagc atgtgcccat ggagtctcag |
| 286921 | tgtttgtaat gtttttgagt tattgagcca gtaatgcttc tctcctcacc agtgagggaa |
| 286981 | tatcctttat agctgatctt ctatctcttt tatctcctgc cctctagtct ctggatgagt |
| 287041 | ccaacagtta ggactgtttt caagatttca ggctagatct gtctggctgt ctgactttga |
| 287101 | gatggtacct tttataaggt cgtctccatc accctcattg aaagtgcctc ctcggactgg |
| 287161 | ccaaaagcag ttaggtaatg ctcttcggtg aacgacagtg aggtaatggc tacagataca |
| 287221 | ggatgctctt gtgttgcttt cccattcttt gctatgaggt attcagctgg cttggtttca |
| 287281 | tttctatttt ccttacctga ttcagctcct ctgaggcaga cataaaaatt gccatttctt |
| 287341 | ccttagacca ttgcttggct tgtacttacc ttttatccct tggctgcctt cttcttaagt |
| 287401 | ggcagaaaat ctgagtgcaa atatgaagtc aatattacat gacctggatg cataaaagct |
| 287461 | gtaattaaat gactgtaatt tattatttat tgactgctga cagtgttcct gggttagtag |
| 287521 | aaagtacagg aaaaaagaca agttcctgtt ttaggtcaca gagaaggaat tttctcccac |
| 287581 | gttacctttg gaaggctcaa aaaagctctg tcagaatcaa aacaagtttt aaaacattaa |
| 287641 | tgatggatga cgaatctttg atgtagatcc cattgtcatt gacttaccaa atggatagct |
| 287701 | tacacgggtg agggcctact aggtgcaagc cattatgaac aaactctgtg ctaggtgata |
| 287761 | aaggaataca gggatgtaga agatgtagac ttacgtagag gttgcaaatt tggcctgcag |
| 287821 | ggtagattca gctaatggat atttttgttt ggtatgccca gtggtggtgt ttgtttttgt |
| 287881 | ttcatttttt atgagctaat attttaaaat gagagctctt acataaaaac acatggattt |
| 287941 | attgtttttc ttgaaaggct ggcaacatta aatctgtatt cccactaggg agaaattggc |
| 288001 | tggagttgag aaaccactgc catctgcagt tgggatattc attctccagt tcctcatact |
| 288061 | cttcaccact cttttctctt acaagctccc gatataaata gagaaatcaa ttgtatggcc |
| 288121 | cttgaagaga aagtgtgtgt gtgtttgtgt gtgtgtgtga gagagagaga gacaggcgtg |
| 288181 | catcagtaga aatgcagaca cagaggagga gacatttgaa ctaagtcttg aagaatgatc |
| 288241 | aggatttcaa gagatgaaag aaagaattcc cggtggaggg acaagtgtaa gacagagcac |
| 288301 | cagagataga tagtgtgggc aatccaggca tagattaaaa aaaaaaaaaa aaaaaactaa |
| 288361 | aatgaggctg ttttagagca gaaaaggcta ataagaatgt ttctctgcta ttctcctaga |
| 288421 | cctgctaatc aataatatgg tttcagaaag tacctgtcat gaagggaagg acaacctgag |
| 288481 | ataggcagag gacatacttg agaattctgt cagaaataaa agataaaatc atggtccttt |
| 288541 | ctactgtatg catgcatgtg catgtataca cacacacaaa gcacatgatt tttttcttct |
| 288601 | gaattccaaa aataatgcca gtttattgta gaaaatttgg aaaatataac aaagctaata |
| 288661 | tgaaagtaaa aatcataggt aatctctgcc actaatgaga ttaattattt ggattgttga |
| 288721 | atcaaatagt gttagataac aagtgctaca tatttatata tagtaacaga tttttataaa |
| 288781 | tatacacata tatacttttg tatacgtata tatgtgtgta aacaggtagt agagtagact |
| 288841 | ggttacttgc ttttatttgt tttacctaac actgatcatt tcccaatgct attaactgtt |
| 288901 | gttttgtaac gtttttaatt tgctttaagt tgaactgtct aattattctt atgataataa |
| 289021 | gtgttgtgat gacatttaat tatatccatg tacataagta tcttcataga taaatcatag |
| 289081 | tggatgtaca aattattttc ttatgataaa tttctctgag ttgaattgct cagtcacagt |
| 289141 | agagggcttt aaaaaagtct attcactttt attacaacag cctctgtaga gactctgcag |
| 289201 | atttcagcat tagattcaga gatctataga atgctaaagt taggtggatt ttgacacaac |
| 289261 | cagttgtaat gcatgtattt aacatatgaa aaattgcatc tgtgaattga aatgaggttc |
| 289321 | ctaagtttat gtagccagag aataataagg acaatgaagt acacttctgg acgaaaatgt |
| 289381 | tatgttaaat gtattgattt ctgtactggc tctatctgag taagcbgggt taaaagggat |
| 289441 | tgtgaatatt tttcaagaca caaatttatg gtcataatgt tatcacaaca aacctatgaa |
| 289501 | gattaactaa ggtggaaaaa ttactggctt ggagcagatt accagaccaa tgtaagttaa |
| 289561 | tgtaatgtaa gttaatgtct ccaaaggctt ctctgagcac agttctcagt gtttcagaag |
| 289621 | agttcatgag gagtagaata gtttgtccct aggaaggatt ttaactgctc taatttaata |
| 289681 | caaagtgtgc cctcttgtaa actttgggtt ttctttggca gttcaatgca gaatatcttt |
| 289741 | atcttcactt cagttttcat tgacaccatt cttactattt accagcaaag caagtaaaga |
| 289801 | atattcaaga agaaatagaa ttagattcag ggcatgatgg ggtaagggaa tgttcaataa |
| 289861 | actcagcatg gtgttcacag ttgtattttt aaggtgatca ttgctcactc gtaagtgaga |
| 289921 | gccgaacagc gatgggagac ttctttaaag tctgatgaag gatgctcagg attatccata |
| 289981 | aataagaggc atataattga ctgactacct tagtggattc ccaatcatat tatattgtat |
| 290041 | tatgtcacat ctcaatgtac tgcttatttt gtatcagaaa ctctacaaaa tactttacat |
| 290101 | gtattattcc atgtgatcgt accagcaatg ctgtgaggtg gtattattgt tcctacttta |
| 290161 | cagtaaactg aggcttagag gatgttaaat aattgctcaa agacacatta atggttagtg |
| 290221 | gtagagttag gcctgaaact cgagtctcat caccttcaaa gccatcaacc aaatttccat |
| 290281 | catgttgaat ttacaccgta atgcttgact ctagaaattt taaaaattct gccaaaactt |
| 290341 | gaataattca tacactaaac ctatggcttt tggaactcaa agtgctcata ggcttaggca |
| 290401 | ggctacctgt ggtagaatgg agttagcaaa tgaactggga tacagaatta gaagatcaac |
| 290461 | tgttctctag ctgggaacgt ggagatatta tatatcagtt cgggaaggta gaatgataaa |
| 290521 | gaatcaggaa gaaatcatca gcatcccata aggggttgag aacatgggaa cagggacaat |
| 290581 | gcagactgta ttttaagtgt tccttgaata tgtggacagg atctgtctgc agttaacagg |
| 290641 | atcctattct caactagggt tgaagtacaa agcctcaagt gctcaatcat cctagcagac |
| 290701 | gaggctagag tttgtcctag atcagtgctt ctggaatttg agcatacatc agaatcccct |
| 290761 | gaggacctgt gaaaacagca tttctgattc agtagatctg aggccaggcc cgagaatgtg |
| 290821 | cttttctgac aagttcccag gtgatgctgc tgactctcgt ctgaggacca cactcaaaag |
| 290881 | ccactgctct ggagccacag cccagactag cttgcagctc taagcagagt gattccagct |
| 290941 | gtgagaaatg ggatttatgt gcagaaggtc aggcaactca ttccacaaca gaattaattc |
| 291001 | tctctgagat cctgaattgc atttcatatt atccacaggt tggcaatctg cctcaaataa |
| 291061 | tgaaacttgc agagagagaa gagatcttcc caggcttttt ctttgtcaag tgagcaccat |
| 291121 | atgtcttccc tctgggtgga tgactgactt agcacatcac aagcaaaggt ccaaaaatta |
| 291181 | aacaacatca tttccaatcc ctcaactatg atggacttta gcccaaatcc acatgggctt |
| 291241 | ttctgatgct ggcccccaac agtcttacca ggaatgagca gtcattagtg agtttattac |
| 291301 | acttagctca ttcaaataat tttatgatct caaagttcaa gagaatctgt ttttttttct |
| 291361 | ttttccctaa ccgtttttta cctttgagct ttttctattt tagagacaaa caaaatatat |
| 291421 | tgcaaattga tttatattta ttaaagtatt gctttaaaaa tttaaaatat aatataacct |
| 291481 | aatgtttata aaagcctacc tctaaaacaa tgagcactga cttttatact acatatgtgt |
| 291541 | agtttttctg ccttctcttt tgttttagtt ttaaagtgag agcttctgtg tttattgcat |
| 291601 | aagttaaatt ccatttctaa ggtgtttaca gagaagcaat tctttcataa ctggttctaa |
| 291661 | ttttcaacca ataacgtatt tttagactag aaagggatct tagaaatgaa ctagttcaga |
| 291721 | ggttggcaaa cttttgctgt aaagggctag atagtaagta ttttagcttt tgcaagccat |
| 291781 | ggtgtctcta ttataactgc taaatgctgt tgttttagta ccagtcatag ataatatata |
| 291841 | aatgaatgaa tatagctgta ttccaataaa atttatttgt taaaacaggt ggcagtccag |
| 291901 | atttggcaca tgggccatag tatgctgacc tttggtctag ttcatttttg atttatgtgt |
| 291961 | caggaaacta agcctaatga gataagtgac ctgcccagct tacctagcta agaaatggta |
| 292021 | gagtgaagtc taaaatgcag gtttgaatcc cagtcaaatg tctgttctac aaatccactt |
| 292081 | ggtccagtat ggccaccctg tatcctttct gtgcatcagg ccaatttata gatcaagggg |
| 292141 | gttgttcctc cagcbgtccc tgctgcaaac acagcaggaa gctagggacc ctagggtgtc |
| 292201 | ctttatgctt ttctagtcaa ctagttataa aatgtctcat ctctaatgac cctcaggagc |
| 292261 | tctatgtgct tgtgagagag tgaagaaaac aggcatttaa aacgttgagt tttctccacg |
| 292321 | ttcagtagtt tggtgggcca cctcatgata ccattctaag gaggcgaagg cttaagattt |
| 292381 | gatttttaaa cagagacaga gaaaggctgt tccaaggcaa cagatgggta cgggccaacc |
| 292441 | gagtaagcat ttttcagatg tgttctgtga tcacacaggg ctccagggga aaagtgctga |
| 292501 | agatcatcca gagcagggca ctcccccaga aggaaaaaga ctcagagtta atgttctcca |
| 292561 | gataagaagc agttcatttt tctccatgaa ggacacattt tttttccatt gatgatttca |
| 292621 | gcacaaaaac tgtcaaccaa acctttttgc ctcttgtgaa cattgccctt ctagaaagtc |
| 292681 | ggcaaactaa cgaaacactt tgtagctgtc cttcaacagt atctagagtg atactgcagt |
| 292741 | tatccaggtc atctttgttc tgtttaatac acaggactct ttattatttc attatgtatc |
| 292801 | atcctatcat tttaccttga gggttaacca ttcctgttat gccatacttg ctcttctttc |
| 292861 | cctgaatctg ttacaaggga gattgtccct atgtttcagt tgaataggag agtaatactg |
| 292921 | ccttttagga aagtgatgaa gttgaggcct ggattcatga gactcttgag gccaagcatt |
| 292981 | tgaaaattga gaatggtttt gttggagttc caaatcagga accaattcta tctttttaca |
| 293041 | aatatatttt tgagttcttg ggtttgggag gaacagaggc tctcttggat catctttgtg |
| 293101 | tgtgtgtgtg tgtgtgtgtg tgtgtgtgtg tgtgtgtgtg tgtgtgttgg ggagggagct |
| 293161 | gttatgggga tatgtgtggt ctgaagcaca cctggagata ataagatctg agcagtgcta |
| 293221 | ggaacctgcc aatgtcttgg tgtctttttc gtggtcttct tggccctctc atttcgtatt |
| 293281 | tactgcattc ttattccctt attaccagtt ggtcagtctc ctctgattct ctatcccaaa |
| 293341 | ttaaataaga gccagtttta ttgcccttgc taattagcat ttactccatt gttagaatct |
| 293401 | cctgttagga tgcctaatgc atcaccagga agcctttaga tgggccaccc tatcacagtt |
| 293461 | aaccacttcc attctattgg ttttttgtgg ctcctctgta caaaaaacag cctagtgttg |
| 293521 | ctgccctgag catgaaggtt aatatccaag acatggagac tggacattga attgagtaac |
| 293581 | ttcttaagct ttttttatat ttcttttgct gtatttactt tatgttaaag ttaattcaca |
| 293641 | ttttcattga aaaaattttt aatatgcaaa acttgaaaaa gaaaaggaaa actatagttc |
| 293701 | atcacccgca tataaagtat gactatcttg ctgattattt tccagtcttt gtgcatagtt |
| 293761 | tcatatagtt gattaatgtg tggctttata ttttttgttt aacattagag cacagttttc |
| 293821 | ctcatgtaca taaatattct ttcaaaatga ttgtaattca ttgcaatata tcatagtata |
| 293881 | aatatactgt atatacataa ctaatgttca acacttagat ggtttcatca ttgcttgtta |
| 293941 | aagtttatca tcacatcaga taattttatt aagacagatt ctagaagttt tcttacagaa |
| 294001 | tcaaaaagaa taagattttt aaagctttta atatgtactg tcaaattgtt tttctgaaag |
| 294061 | gttgctacag tttttactgt caccagcagt gtataaggga gcctgtcttg ctgtactttc |
| 294121 | atagcattgg atgacagcat ttaaaaatga gtctcactgt gtttaaaaaa aaaaaggtgc |
| 294181 | tttctttgtt ttatttatat ctggttactt atcctagtga ttattctgct attgttgctg |
| 294241 | aagggaagta attgaaaccc tagccatgcc tatgcagaac aatttgcctt tcagttttga |
| 294301 | ccatgtgaga cgctaatcca atgaacattg tgtctcctct agccttcata caccgaattc |
| 294361 | gacatcagtg gcaacgtcct cgctctgatc ttcaaccaag gcatgatctg gtaggccagc |
| 294421 | tgttggacag cttatcactt acagaaaagc ctcccaggtt atttttgcat acagcattga |
| 294481 | atcctggtgt tagaggagaa tacaatcggt gtctaactcc atatttactt ttgcaaagtg |
| 294541 | gatgcctgta tatagtttcc ttttctttca tatcttaaat gtcagtcatc aaaggtgtct |
| 294601 | ctctgttttg caaagcactt cttcatcaaa taatgggagt ctgtgttctg gttagcagat |
| 294661 | ttatttgagg actatatttt tatattttgt gacgccagga tctaatatta aaacattaat |
| 294721 | aattacatta ccacatgata agtatgaaat aaattaacat aaggcctttc cgagagaccg |
| 294781 | agtttatttt gttgtcacta ctaaatatat ttaaaatgta acttatagct acttttaaaa |
| 294841 | ataatacctt atcaaatcca atagtttatc gagatgaaac gcatgtttta ggaaggtcga |
| 294901 | gttaaaatat gatcttcatt ttgtaacttg ttttataggg ccatggcaca tcagaattat |
| 294961 | tttttttgat gtgtgaaggg ttgtcatatc ttttatcaaa ttagagcatt ctcactgtaa |
| 295021 | acttgacagg ttaagatgag tcgatacagt agaaatcgtt tttgagttta aaaactgaat |
| 295081 | cacgacatcc gattcatctg gggaccatgt gtcttggaaa tctgtcactt cagatttcca |
| 295141 | gcctacaagc agttacaata aggctacttt atcctgggga catgtgccta agacaatatt |
| 295201 | atgctgccaa ccataccatt gtcctattca caagtgccgg tatagactca gtttttgaac |
| 295261 | aagtttcata tattgtacca atagatctgt cctgaattat taaacctttg ggtgctgaca |
| 295321 | gacaccggac ccctctgcaa atgctaaaac cgtcttgctt ctgtcacaca aagacaactc |
| 295381 | tccagggctc catcgtcctg ccatgggatg actgttaaat tcctgtgcct gactaggtga |
| 295441 | atcaatatgg aaaagatatt ataaaaatat tgtttcctcc tttgtcaggt aggtttaaaa |
| 295501 | atctaatttt tattcccttc ctttctaaat tttccaagta tgactcacat gtccagactc |
| 295561 | actaaggaag gaaatgcatc ctacattttc caagcaggga ggaaagtcaa ggtggcccga |
| 295621 | ggaacgtcta ctgacacaga agtaaaggga gcagcttctg tgggttctga gctttcattt |
| 295681 | cctggagttc aatttgctgt tatggcagaa aatggctaac acggctatgg gagtaatgag |
| 295741 | aaaccactgt tctatcagtg gcttttacac aaagtgtcat aaatccttca ggcctcatgg |
| 295801 | gtaccattca cgcagacata tgctgcacgt cgattgtgtt ctttcagagt taagacaaca |
| 295861 | gattggtcta gaaatttgtt tttattgtca gaaaagctgt tataatggct gtcctgcttg |
| 295921 | gtttcactac tgattttgca actatgttag tccactattg ttcatattga aattcttaaa |
| 295981 | tatctaacat gtttttccag ttctctcgtg ggcagatcca ttatcaaaat ctctgcactg |
| 296041 | tctttttctg tttattaatt cttcagacag tggtcaagct tgcttctggc taatttgaag |
| 296101 | agaatattga gttttttgag catacaaaga tattcacaca ctttccaaag ttccagaagc |
| 296161 | aaactgacca ttattctatt attcaccttc acgtcaatgc ttggcacaaa tattcttttc |
| 296221 | ctaaccctag gaggctgatg agggaggggg atgtcatgta gagggaggtg tggggcaggt |
| 296281 | gtaatgtaaa attagtaggc tgactctgca caaaggtcct cacacacaat cgttccatta |
| 296341 | ttttatgaag catgaggata taatgcctga gcttaaccat tttctacaga aacaattaaa |
| 296401 | aatgtacggg gatgttttat tcaattccat tggcttgtga ctggagatat tgaattactc |
| 296461 | ctttaggaat cgctgagtag tggaggttat ttacgcagat gttgttaaca tcaacattta |
| 296521 | tagataaaat ccattttgct atgatttggt tgaatgatta gtaaccttta tttacgcact |
| 296581 | tattttttga aatacacatg atagtttctg tgctaatatt tttaaatgat gaaagcacag |
| 296641 | aatatcttta tcatagcagg atattgagaa atggcagaga acacacagtg agagagaaaa |
| 296701 | tgagttttgg acattgctcc aacactgctt cactgggtac tctcccgcca ggtttatcac |
| 296761 | ctttttttct tcactttctc agttgatcag atgtgaataa tttacctgac atgtacatgt |
| 296821 | cgctgatgta ataaggagag ttaaataaaa gaagctttca ttttctttga tcttccagga |
| 296881 | agaaaagaat tttataaggc taaagtgtta caatgatttt tactgacaga tgatgggatc |
| 296941 | atgcctgggt aagggactta gtgagccgag ctgattagta atgcatgagt aaagatagga |
| 297001 | tgagcattaa cattcggata ttattatgcc aggacttatt tttctagctt atggctcttg |
| 297061 | agttatttgt ttaaaatgtc tttgtgatac ttattttgaa attttgaaat ttatttatag |
| 297121 | atgtatacac aaataataag catatacata caaacaatgt gcacgtatat aggtacaaat |
| 297181 | atatgtggtt ttaggcaagt ctcgattttg aattacgtgc aaaattatat tttagaattg |
| 297241 | atcaggttat gcagcaatga aacaacctca aaatcgtagc agctcataaa aggaacatgt |
| 297301 | tcaatgtggg gtggaagaag agctttgctc ttagaactta ccttcacttt agagacccag |
| 297361 | actgatggaa taggatccat ctgaaacatt gctatcacac tagcagagaa tgaagagaag |
| 297421 | gaaaaccaca caggactttt aaagtttcta cccagcagta aggacctaat ttctattcat |
| 297481 | actttattgg ccaaaacaag tgatgtcacc acctgatttt taggaagact caaagtgtat |
| 297541 | tacatcaaca tgtattggta ttggggagta taatctagtg ctttgcaatt ctaacccatt |
| 297601 | agctgggact atcacttgct tacttgctca cttttttggc gttccctctc tcttgctgtc |
| 297661 | ctgtaacaaa agtatactgt attgttttaa aatctgtctt ctcattagaa aaaaatagtt |
| 297721 | taacttccta caaagtcttt gttcaattca ttatggtaaa atatcattcg tatctattgt |
| 297781 | ccgaaatctt gtcaacaaga cagcccaaat tgtgacaata ttccactttt caaataaatg |
| 297841 | agttaacttt gggttggcaa aagttcaatt atagtggaaa ctaatttctt catctaaatt |
| 297901 | aaaaatgtct ctataatgaa ccaaatttac gttggattgg ctaaacaact attcagggag |
| 297961 | tacaaaatgc taaacctagc tataaatgtt gagggcttca ttatagatag gacagtttaa |
| 298021 | aagacagggc tccccttaca tttttaaaat aagtgcacat atatcttctt tttgattttg |
| 298081 | aaataataaa ttgctattta tattgattta tggtgctaat gaattttctc atccaagaag |
| 298141 | agtgaaactt attttgttga aataatcaac taagccatca agtaaaagtg accacaccta |
| 298201 | agttgttccc acctaaaagt agtattttaa aatgcttata aaaactcaga tgcacaaagc |
| 298261 | agagaattcc caagacaagc taaagtaaga aagtaaacag ataaactaaa tttaaataaa |
| 298321 | tgtgtggaat tttcatctca aaaacctata agctagttat aaattttcaa taaaacccta |
| 298381 | ttttaggagg cacaaacaca tcattgcaat tggctttaaa acaccatatc acctacaaag |
| 298441 | agaaaatgat caacatcaga aagagaaaat ttattttaat ttttttcttt cattaagcaa |
| 298501 | aaaacttttt tcatttgtac agtcgtggcc cactgcaacc ttgacctcct gtcattaagc |
| 298561 | aaaaactaat tattcatgac agaagtgatt aatgcaaatg tacagttttt ttgagtagaa |
| 298621 | gaagtgactt taagggttaa ttatttttaa caagttatat ttataggtgt attagtcaat |
| 298681 | gatataagtg ttggggaaag tttattttag aattagaaga aagaagtaaa acaattgtaa |
| 298741 | atattgttta ctctgttgta gtttaaattc actaatgata gtaggtatag ttagttacag |
| 298801 | catcctttct atgaaataat tatgatatgc aattcctaca ataatgggga aagtggcaaa |
| 298861 | atgtgtttag aagttggaaa tagataagtg cagtttcttt atgaaaaggg tttgtctggt |
| 298921 | tgaaagtggc agtgtatttt ctgcctttgg aaaagaagca tgatgtcaaa taaacaggtg |
| 298981 | cagtgtgact ttgttatgga gtaaagactc aaaactgagc agagttctgt tttctttcta |
| 299041 | ggatgggctc cttctttgct cccagcctcc caggcatcaa tatccttcga ctccatacat |
| 299101 | ccatgtactt ccagtgctgg gccgttatgt gctgcaatgt tcctgaggcc agggtcttca |
| 299161 | aagcttccag atcaaataac ttctacctgg gcatgctact gctcatcctc ttcctgtcca |
| 299221 | caatgcctgt cttgtacatg atcgtgtccc tcccaccatc ttttgattgt ggtccattca |
| 299281 | ggtctcttgc ttttgaaatt tgactcaggc atcgtgttct ttcgggggtg gaggtgggaa |
| 299341 | tggtcattca ttgtataagc tattttttcc ccccaaacaa tgacattttt ggttggtgga |
| 299401 | aatgagatcc cggctgggcg cagtggctca tgcctgtaat cccagcactt tgggaggctg |
| 299461 | aggcaggcag attacctgag gtcaggagtt cgagacaagc ctggccaaca cggtgaaacc |
| 299521 | tcgtctctac taaaaataca aagaaaaaaa aattagtcgc gtgtggtggt gggtgcctgt |
| 299581 | aatccctgct acttgagagg ctgaggcagg agaatcactt gagctcagga ggcggaggtt |
| 299641 | gcagtgagct gagatggtgc cattgcactc cagcctggag gacaagagca aaactctgtc |
| 299701 | tcaaaaaaaa aaaaaaagaa agaaatgaga tcctttgggt attcaggttc aataggtgac |
| 299761 | atggagattc ttaggcaagt tctgtctatt tcctcatttg ggaatcataa aagagaaaat |
| 299821 | actttatact tttccaggct ctgcctgggt aaaatatgta tggtgaatct gagctgtttc |
| 299881 | catgttagag gatagctaag agcaaggtct gatgacagtg gtctggatgt gagtttgcct |
| 299941 | gactcbgggc cgtcacatcc agacgtggtc agctatcact acttctcttg tgcattacta |
| 300001 | ccttaaaaag agagagagag agacagacag agagagagag aataccccac actttaccta |
| 300061 | ggaaagagaa ttattactaa atactaatga gcataaggag ggccacccaa tttgttatcc |
| 300121 | aaaatatcac atgctagtga aaaaaattaa ggcbgttcca catatatatt ctctcctaat |
| 300181 | tatcattcaa gtcaggaatc gagagtcaca acggctcctt gatccaattt agagatacac |
| 300241 | atttctacag ttctctatga cagagctctc ttctctctat gacacatatc agaaacctaa |
| 300301 | gtccctggga tctggaggat gaagtttctt tccctaaagg gccttagaaa tgaatctact |
| 300361 | acaagttctc ccaagaatct ctgcatgttg attcactggc cagcatgcac ttgagctgtt |
| 300421 | tctccttttc agtgaaggaa atgagactgt aaaaagccat gtgaatgata tgcatgatgc |
| 300481 | tgtaatgccc acatataatt cctccattat gttgtcagac ccaagttatt taattaaagt |
| 300541 | caaaaggttc attgctgaca gactaagtat ataagagaca ttttcactct taacagtagt |
| 300601 | ctgagttatt gctttgctgg aaaacaagaa aatgttaagc cagctgatcg agttaaacta |
| 300661 | gctggacctc tgtctactca gagaactgat gttgagaagc tctgttaatt ccgttgtgtg |
| 300721 | tgtgtgtgtg tgtgtgtgtg tgtgtgtgtg tgtgtgtgtg tttccaagtg ggctgaaata |
| 300781 | aataatgcag acagtgacat ctggagacta aatatgaaat tacagtcttg atgagacatt |
| 300841 | cgtctcaata aattccgaac caatctcaga gtacaaagtt caaggaatat gccattcaaa |
| 300901 | ggctttagtt aattgcaaat tattcacact acttattatc caggataagt ttaggtgtgc |
| 300961 | attaagctat taattggaag ttgatccttc tcagtaaaac atagcaaagg accctagctg |
| 301021 | cctgtaaggg aaaccacaca atgtaaacat ggatctccac agatgcattc agatttacaa |
| 301081 | tacgtcttag acatgaacaa tagttgcaca atttcagctt cttaagccct aactcttctg |
| 301141 | gctttcctaa ttggcaaact taggcaaaat tatggcatgt aaatcactat tttgaaatca |
| 301201 | gggaaattta ttttttattt ttaaaattat ttatttgttt tttaatttcc ataggttatt |
| 301261 | ggggaacaag tagtgtttgg ttacttgagt cagttcttta gggtgatttg tgagaaatca |
| 301321 | gggaatttta aatattttca atggagtact gggaagggtt atctctatgc tatttagatt |
| 301381 | ttttttttca tgtcagtttc ctcactttag agccaaagga tgtttgcatt gtttatttgt |
| 301441 | ctggacttaa aagtttgaaa ggattgtcct gctctagaaa tgaggtgaga atgcttgtat |
| 301501 | gcttgtacta gtgggtgcct catagcttgt catctttatg aaccccaagt tttaggtgat |
| 301561 | ttgcttaacc ttcctggtga aggttgtctg actctatcta gatcctgggc aagcaggaat |
| 301621 | ttaggaaata taaatttgaa ctaggttact ggaggtatca cagtgatggc tagttgctct |
| 301681 | ccagtgtagg gaagttttca ggtaagatgg ctatagtata tttatccatt cagtaaagca |
| 301741 | atttgatgag atattctagc ttgtctggtt ttataagacc tggctagaga gggtaaattt |
| 301801 | tccaagaaat tattccaata ggctagtaag tggatttatc gtaaatagtt gacaatttaa |
| 301861 | agatgtccag atgaaggcaa ttctaattgt tctatagcat ttcctgacac ctgatgtttc |
| 301921 | ctcccatcta tgtcaataat tctgaacaat ttatagttct ctaggttttt atatacatcc |
| 301981 | ctgcttacat tatgacaatt ttatttttca tatattttca tcttactgca aagataatat |
| 302041 | gtgtttatgc tagaaaacct aaacattgta gaaatatttt tacatgaaaa gaaacatggc |
| 302101 | ccataatctt gaaaacctga aataacaact ttttagcatt ttatattctg ttttgccttt |
| 302161 | catgcatgat ttttcataac tgagcttgta ctgacacagg atgtttctca gcctcttcac |
| 302221 | tggactcaca gaggggcacc ctgtctactc ggcctgctgt gcttaacccc ttgtgggagg |
| 302281 | aagcacgtgg gcaagtgagt gcgggatctg gcgagacaca ctgggcactg acacaggagc |
| 302341 | aagctccatg tggggcccgt ggccagacca ggtgtgtcac cttgaggaga atgcaatggt |
| 302401 | gcccaagtgc ctatgaccct aaagccccag agggggtgtt acaatgcttc ctgagttcca |
| 302461 | ccatcctcag cctgatggat ggcagtgtct tagcagctca gttggcccct tgcctcatca |
| 302521 | tgtggggcag ctgccctcca ctggagaggg caaagggcca gtgtgacagt ctttcctggg |
| 302581 | ttcccacaat cggtgggtcc caagctcttg tccagcatcc aagaagaatg aggtcacatg |
| 302641 | gattattgaa ggatggtgaa ggaggagaat tttattgagt aatgaaattg gctctcagca |
| 302701 | gagagggcag ttggagaggg gccaggaagg gcaggtcatc ttccccaaag tcaggttgtc |
| 302761 | tcttctccaa agtcaggccg actcttcccc aaagtcaggc cgtctctccc ctctaccaac |
| 302821 | tgagtctgtg gtctttatag gcacaggatg gaagtgtgtg ctgactggtt tgtgagtatg |
| 302881 | caaaaaaggc taaagtgaag gtgtcactca aaggtagaca cgacagtata gaaacccaac |
| 302941 | taggaaaggg taggtatatg taaaataggt gaagggtggg gatgaatcag aggaaagtgc |
| 303001 | gccaaacagg aagacaagtt ctcaatccgg tctgaggatt taacttggac cttggctttc |
| 303061 | aggctttaaa ctgtctttgg cttggaggtg gcatttcacc aggtacctgc ccctatctgc |
| 303121 | ctaggcattt ggctgcctcc tgttgctatc agtatactag gtgcaggttt tttagtatta |
| 303181 | aaagttaaaa ttatattgtg agactgctat tatattggtc atttgcaatc atgctttatg |
| 303241 | catctatttt tcttaatagt ttagctgact tctagagatt ggggatagag aagtttcctc |
| 303301 | tctgtggatc taggacacag taaagtgctg gtcaataatt tgaatgaatg aatgaataat |
| 303361 | gactgcttat tgtgcactaa gcactagaag agacacaggg ttaagtccat gcattaagca |
| 303421 | ttgattctgg tcctgtggca cttatcaccc agcbgggaag acaggcctcc tcataaactg |
| 303481 | ttctaatcta gagtggcgct atgcctacag caggactatg gatagacaca gacaactgga |
| 303541 | aaacaattct gagaatattg tatgatagca tactttggct aacctggcag gagaaggcat |
| 303601 | tgccagggac atgtagatgc gtccataatt tgtacgtaat taagatatct ggactccttt |
| 303661 | ctttggtaaa agacctgacc tgaaaaaggt acacaggaat ccccagggac ttagcaactt |
| 303721 | tgctttgggt cacactggat gctgagaagg cctttgtgtg tagggataat ttcataaaat |
| 303781 | ttgaatgccc ccactctaac tacgttcatc agctatgacc tgaggtgctg gagaagggag |
| 303841 | gatagatggt cttatctttt ttggtacttt taatttatct gcttatcctg tattccatct |
| 303901 | ggcbggggct gcattggggg gtatgaacaa tttggaatgg tgaaaaataa aacatattgg |
| 303961 | aatagggagt tataatctta tattgcttgt aagcttcatt ccctcttatg tatcataagt |
| 304021 | cttgaaaatt agagtgtaga tctttaattt gtgaagcaaa acttgtacct ctgtagtcca |
| 304081 | atgactactg acaaaatata tggagtcact atgtctgctg gaagatagta ttggttagac |
| 304141 | caggagaaaa aaaccataat ctgggacttg cgtgtcattg ttatttagta gttgaaaatg |
| 304201 | cttaaagatt aaaatacaaa agcaaaacta aacattgtat taaatgttgc accaacattt |
| 304261 | attctgatga tgcatacaat ttggtgaaac ccaacccaaa tctcttctga aaattacatc |
| 304321 | ttttcgtagt acaatcagta tgcatataca gagaaaataa tgatgtaatg aatattttga |
| 304381 | atattatggt acaattctag ctattcctta gtaagtcaag acatcctgtt ctcagttttc |
| 304441 | tagtttatag gagctgatac ttgccttcat ggagcttagc agtggagcta agctggtatt |
| 304501 | cattagggcc tgtccaggag aagaaactga gagggaaaaa acccatgatt cggtgtggtt |
| 304561 | accttaccta ttaacatatc tgatgaagga agtctggtgg aaaatgaggt ggaagctatt |
| 304621 | gcgtggaaag agatattgga ttatatgtgg attttattcc actgggctat tccttgctct |
| 304681 | catttccaag gctaattaaa aatacttagc tcaaagagag tgttctccta caagagcagc |
| 304741 | tgactgagag gcagacttat gagctattta caaaatatat ttcaatcaaa atcttagaaa |
| 304801 | tacagttttt aaaaatcttc tcctaaatat gtggttaatt ttctaactgc tttgactata |
| 304861 | tgtttatact gggatcatat ttctcgtatc ttacccatat attgactaca tgaggtcaaa |
| 304921 | gtgtcagcaa gttgtagcta aacatcagat tcctaccctg aaagaggacc taagcagtaa |
| 304981 | ttgagaaaga tttccagttt tcttgcttta accatggttt ttccatatgt tcttaataaa |
| 305041 | cttatctccc cctttttaat tcccccagtg gcaaaaatag aatgtttgaa gtcattggag |
| 305101 | agaccctgga gcacgatttc ccaagctgga tggcgaagat cttgagacag ctttcaaacc |
| 305161 | ctgggctggt cattgcbgtc attttggtga tggtgtatgt gcttttcctc ctcatagaaa |
| 305221 | gagcctctgt gatgttcttc ctggctgttt ttacatttca gctttttcag ctctctcact |
| 305281 | ctccctaagg gttctgctgt aacctatcca aattcaacac tgattacatg gtggtgagag |
| 305341 | gctaaaattc atgagccata ttctgatcct attggatgta attcacaggc atctgcatct |
| 305401 | gtctttgctt ccccaggatt ataagatttg ttcccaagta accacaataa ttatccataa |
| 305461 | acagctaaag caagggaaac ataaatgcta aatgctaaat ctaatcagta cattgagctt |
| 305521 | ccccccaaca acccggcctc cacctctcgt tccataaagc agatggcaat gaatatacag |
| 305581 | aaataatgat cctctaagtt aatattcccc ttgggggccc tatagactat attttagggg |
| 305641 | caagggcttc aagggtctta aaaatttcac tgtccttgtt gttagagggc cgccaataac |
| 305701 | tgtgtgttca cgataataga atcagaggac cagaggatct tgggaagttc ctgtagtctg |
| 305761 | tcccttcaaa gtcagaagtg atttccaaag gggaacttgt cagatgactt ttgttttcac |
| 305821 | ataactttca ttggcttctg actcttggcc atcacagata aacttagatt ctaagtaaaa |
| 305881 | gtacagattt gcbgtggaag agccaaaagc agcgtccatc tcttcctttc agtccctgag |
| 305941 | tgcctcctac atagaatgtc tggagctgcc acgactctca gtcagtgggt aaatattaaa |
| 306001 | cagccccagg gacactttaa gaacaaagtt gatgcaaagg atttggttca tttaaataaa |
| 306061 | ggtaaaacaa ggaaatctca gggagaaaac tcccagtggt ttgcagtaaa tgagcaggga |
| 306121 | ttgtgaccca gttattgtcg tgatcacaag ccacataaag tagtgagggc aggtttatct |
| 306181 | tcttcaattt tataacctaa gaaattgatt tacacaaaga aagtgatttt ccctagacaa |
| 306241 | gagagagagt aaaatggtca tagaaggacc tgaagcagat cctttcacag taaatccagt |
| 306301 | gctcacttct ttatactgcg aggctttctg tgagggagag ctaataacct gtagggataa |
| 306361 | ttaaacagta aatcagatta ccattatata ttacataacc ttgataatgg ggtgctatta |
| 306421 | agaatctgat agtaaatctc tggcacagat gcattagaaa atgacctact gaatgcagca |
| 306481 | tgtttcacca gatggccttt gaaacaattt tctttctcta catgtccatg atacagtggc |
| 306541 | ttctgagagc atgttaatca gtatcctgtg gcctttgaga gtcaaggccc tttagtggta |
| 306601 | tgaatgaggt gttgtttaaa acacacacac acacacacac acaatgtaaa tgtcagattt |
| 306661 | cgttaccata ttcttacttg attaggagac atgtttattt ttaagtgaag gagtggcatt |
| 306721 | gttcaaatgc cttaatccaa agatttagta atcagtccta agagggttta aaaggaattc |
| 306781 | acactgcctt tgtttcaggt actatttaca cactgactca tttaattccc ataacagctt |
| 306841 | tgagaagctg gcttcattaa tcatactatc aataacacat tgaaattctg ccccaagtca |
| 306901 | agtgactaag tggaactgaa actcatgtct tctccttatt tcctacactc acttgcagca |
| 306961 | ccaaacaggg atcagaatca gtgggaattt cagatgggct gaaagccact tgtccgaggt |
| 307021 | ggtatagacc cagggtcagc acacttttcc taattcgagg gccagaggca aattaggcca |
| 307081 | agaggcaaaa ttgaggctct taattaagta attactaata ataaccgttt aaaagacaga |
| 307141 | aaaaccattc ttaattcatg ggccatacaa aacagtctgg cagtcatctt catcctgcag |
| 307201 | gacctagttt gctttgatct ggacagcctg gaggaaagct ggccccatgc aaatgtcaaa |
| 307261 | tagatgtact gaaaggttga ttgtggctct gaggttctga tttaaaaccc agattttagc |
| 307321 | ttattactga gtatattttt tcaaattctg agatctcatc ttctattttt ggggcccata |
| 307381 | caattggctt agctttttat tacctttaat tagagaattg tactagtatg ttgaatttcc |
| 307441 | cccaatggat tatattaaat caacctggat ggctttcggg tatctaagca gagttcaggt |
| 307501 | tagttctctg caggcagttt cattcctttg gagactagaa aaagatttgt gaggaatact |
| 307561 | tatttaacgt gcattacaag gtagaaaatc atggtggata aatagagaat tccagaactt |
| 307621 | gaaaggactt gtgaaatctt tgagttcatc ttccaaatcc aggaactttt ctaagaaaat |
| 307681 | ccttataata cacaccacac acaaacacac acacacacaa acatttattg agcacctatt |
| 307741 | tcatgccaga tattgccctg catgcattta tgtatgtaat tttagtaaaa ctcccatcac |
| 307801 | tcatgtaaga gataaacaaa ctcagccaaa ccgtatcaat aattgtgttg ctagcaccag |
| 307861 | atggttcata aaggatactg tctttcattt tggggagtag aggaaatgtg ttcaatatcc |
| 307921 | agttatttgc agcaaagagt aatataagtt acctttttta ctgcatttct tctttgtttg |
| 307981 | tttgttcgtt ttgccttaag tgaagataag catatttatt tttacagaat tgtctggcta |
| 308041 | gaatttgccc tttctagaat gtaaatgtca tttaaaatcc aataatattc ctttatacaa |
| 308101 | cgttttcttt ttgagggaga aagaaatgca aacaatacat tctacggaaa aaattccatg |
| 308161 | ttcattatct atgcctatga ggattacatt cttagctgca aaggccaaag gacgaaattt |
| 308221 | aaggcagaaa gtcgttttcc tttttgttcg gcatgttccc taagctgcag taggttttcc |
| 308281 | attctctggg atgccattgc catccattta aaatgctact ttcaattata atttaaactt |
| 308341 | atgtgaatac atttccagga aaaagctaat attaggcagt gtgaaatagc agacagaaca |
| 308401 | ggctgtggat caggagcctt gggccccaac tttccaactt caccccagct tcatccctat |
| 308461 | gtcatcctga atgtatctct ttacctctct ggacctcagc ttttatctat aagacaagag |
| 308521 | atttagagta gaagatagct taatgttcat tcccatgctg atatttcata atttacttaa |
| 308581 | tgtaaattta agaagtatct tggggaactg aaatatacct tacactgtat tttttttctt |
| 308641 | tttaatttag tttggccatc tattatctca atgctactgc caagggccag aaggcagcga |
| 308701 | atctggatct caaaaagaag atgaaaatgg tatgatacaa tttatttcat agaaatatta |
| 308761 | tctttattaa tgtcaagcag tagaaaacac tgagaaatct acttttttcc ccttattttt |
| 308821 | tattgtgtag caagctttgg agaacaaaat gcgaaacaag aaaatggcag ctgcacgagc |
| 308881 | aggttggaga tacgtttatg tttgtaatgt ttgtaatttt tctttttctt tttctttctt |
| 308941 | tttttttttt ttttgctttt tctccattgg atggtgagtg gcattattgc tgtgagcgag |
| 309001 | tcattccaca atccttacct tccacctttt tagcccttct caggcatcac atccagggta |
| 309061 | tttggttgtt ttctagtggg aggaaaaaaa gagaaatgaa aatgtgggca tataaacttg |
| 309121 | gcagtagtga tttttaaaag tgaccttgaa aatgcgcaga aaatgaagaa atcccccata |
| 309181 | tagtcgtcta caaacagcag atacaaatgc agatgctctc ctgcccatgt tgactatttt |
| 309241 | catacatgga aggatatggc aagaagatcc caagagggtc ctctgggctt tccaccactg |
| 309301 | attgccagaa gccctttcta atccattaaa ctttcttttt ttaaaaacct ctttattttt |
| 309361 | taaagtatta gagtaaagcc aacttctagt tgccaaaatt aataatatgc tttgagttcc |
| 309421 | ccacggaaag gtgataccta agacctttag tgaaaatctt ttccaacttt gtccttactc |
| 309481 | ctaactttaa aactctttac attagtagga ctgtttcccc actgtaagta ataaaacact |
| 309541 | caaattggtt taattgagaa agagtaattt attcgaccac acaaatgcag ggaaatggta |
| 309601 | tgtatggctt caggccactt tcttttttct atatatatat atatttttta attatacttt |
| 309661 | aagttctagg gtacatgtgc acaacgtgca ggttagttac atatgtatac atgtgccatg |
| 309721 | ttggtgtgct gcacccatta actcatcatt tacattaggt atatgtccta atgctagccc |
| 309781 | tccctgctcc ccccaccgca cgacaggccc cggtatgtga tgttcccctt cctgtgtcca |
| 309841 | agtgttctca ttgttcaatt tccacctatg agtaagaaca tgcggtgttt ggttttttgt |
| 309901 | ccttgcgata gtttgctgag aatgatggtt tccagcttca tctatgtccc tacaaaggac |
| 309961 | atgaactcat cattttttat ggctgcatag tattccatgg tgtatatgtg ccacattttc |
| 310021 | ttaatccagt ctatcattgt tggacatttg ggttggttcc aagtctttgc tattgtgaat |
| 310081 | agtgccgcaa taaacatacg tgtgcatgtg tctttatagc agcatgattt ataatccttt |
| 310141 | gggtatatac ccaaaggatt ttttttcttt tttgagacct ggtctggctc tgtggcccag |
| 310201 | gctggagggc agtggtatga tctcggctca ctgcagctcc aacttcccag gctgaagtga |
| 310261 | tccttcctcc tcagcctcct gagtagtggg gacagcgcac accaccatgc ctggataatt |
| 310321 | tttaattttt tttttgaagt gaggtcttgc taagttgccc aggctgctct caaagtcttg |
| 310381 | ggctcaggtg atcttctctt tttggcctcc caaagtgttg ggattaaaag catgaaccac |
| 310441 | tgtgcccagc attcagggca ctttttatcc taagtttaga acagagtcag gtctgagccc |
| 310501 | acctctctgt gaatctctga agctaaactc ctttcacatt ggctgacctt tatggcagca |
| 310561 | ggaatggatg cagcaacttc caatgccatg tccttagact gtaaaacttc tttcctagaa |
| 310621 | attcctcaac ctctcctcct ttcagattgg ccccatatgg gtcatgtatc catccttgtg |
| 310681 | ccagtcactg tgtctgagta tggtaagtta ctgaagtcag tcaggaccca tccttgaagc |
| 310741 | tgggattggt ctgttttcct gacacatgtg aaatgcactg gggaggtcac acctacctaa |
| 310801 | gagaaggaga aaaggatgct gggtgtcccc aaacaacaaa tgttcaagac ttggttttgt |
| 310861 | tgccttcttt atgcttagcc ttttttcttt tccctctctc tatctagcat gcataaatgt |
| 310921 | aaagttgaat gcbgggtgct gaattagatg attacagtga tgtacagtta tcagactagt |
| 310981 | ttttaatgaa atttttaatt ttttaaatca atactacatg tgtgcataat ttagagttcc |
| 311041 | atttagaatt tcataattct ataaggctta tcatgaaaaa cagcatcttc ttctgcctcc |
| 311101 | tacaccagtt ttgctctctt ctcctcccct gcactcaaat accctaagac aaacactttc |
| 311161 | aatttgttag ttgattttta gatatttatc tccaaattac ctaattttgt tgtaatttct |
| 311221 | tgacttttta gttttaagta ttatctctta aaattattaa ctacaatgga tataataatt |
| 311281 | ttaatagata atatttaaac gatttttata ctcttgcccc agtctttcta tgcattctac |
| 311341 | ctatgtagtt atattattat tttggttagg ccagtataca ttattatgga cacacagtct |
| 311401 | tcacagctaa gccaagtagt aaactatgat acttgtgcat actttaaaat tttctcagga |
| 311461 | ttcataattc ataatttctc tttttaaaca ttttcttatt tttatatatg tttcagtgat |
| 311521 | gcatttaatt tccaaatctc tgctatttat tgagttatac tctcaatata ttcagacata |
| 311581 | ttgggttatc tgtccatttc atttccttag agaaatcttt cccagaatct tctgcacttc |
| 311641 | tccaatttca actagtgtgt gtctgggata cagctgtcat cctttcattt ttcttcactg |
| 311701 | tcattcaaca ggatctctgt cactttatcc tgttttggat actgtgtttt ccattttccc |
| 311761 | caacttcctc tcttttggtc tgctcacatt ttgccagtaa gaaagggtat gtgagaggca |
| 311821 | aattttctga gaccatgcct atctgaaatt gttcttctct tactctccct tttgactgat |
| 311881 | agtttggggg tcaaaaatac tcatctaatt atattagaaa taatatccct tcaaaatagt |
| 311941 | attttttcag aggtttccca tgccttttag attccacaat tgctcttgag tagtttaaag |
| 312001 | ccattgtgat tcttagtctt tcttgagcaa cttgtatttt tgattatctg tttggttttc |
| 312061 | caatctggaa agttctaggg tctccttatc tgcatgttca gaatttcatg atggtgtatc |
| 312121 | ttgcatggat ctatttttat tccttgtgta ctcatcaatg gacttttgct ctttggttga |
| 312181 | agggaatttt cttgaattgt ttacaaattc tttccatcca ttttctgttt tttttttttt |
| 312241 | catgtagaat ttctaattta tttttcatcc ttaaattccc tttgtctctt tgctttacct |
| 312301 | atgaacattt ccttatcttt aaattttaac atttctcttg gccttttcac ttttgctatc |
| 312361 | ataattttag tttctgcaag ctgttttgtt ctttaattct tcttttttaa acagcatgct |
| 312421 | gtttttgttt aatggctgca atggcttgtt ttgtctttat gagaatatta ataactcttt |
| 312481 | ttgatgtttc tttgcctttg atagtctgtt ttctctaagc tgttttgttc ttctttctcc |
| 312541 | cctgcttggt aattcccctg ctttgtgacc ctcagctcat atttcagggt aggatgcaaa |
| 312601 | ggtgggtttc gaagctttaa gcacatggat ggggcttgtg ggcagatcct cattggggga |
| 312661 | ctctgcctgg gctgccgctg aacccccatg tcagtatttt taggcttctc ctcttaagct |
| 312721 | gatcagattc ctcagaaaaa ttacttccga actcctgccc agagagtaaa gatttgcctg |
| 312781 | gcaaatctgt agcacctgag tgggaaaaac aacacgggtg gggctcagct ttcaacctac |
| 312841 | aaatgctcac ttagccccct ctttttactg cggcactcct tgtggtcttc taacccagaa |
| 312901 | gcatctctgt tttactcttt ttagaaaaaa ttattccagt cttctgccag attaaaggta |
| 312961 | gtgggggttg gggagcaatt attcatttgt accaagtgaa gccgatctca gactctaact |
| 313021 | gctgctgttt cgttttttaa taacccccac ccctttgccc caccaagctt gactgcttct |
| 313081 | taacagctaa aacatcctct ttgtattggt tccttacttc cagaggtacc tgttgctgca |
| 313141 | aattactgaa cgtttcagag attttatgtg taaattatgt tgcttactgt ctttttcctc |
| 313201 | ccctggctta gcttttcagt ttgttagaat tgataagtca ttatcattaa tctgtctgct |
| 313261 | ttccagcttc taaaattttg tcattgatgt ctcttcccct attctccccc tccttgcagg |
| 313321 | tttatgcaac cttctccatc ttcctcccca accccctcaa aatttcttga ctgtcatgtt |
| 313381 | tgtgaaaggg tgaaagttca attcaatgta tttacctccg cagtttaggc aaacctttgt |
| 313441 | atttcctaca ctaggagaac aatggtttta tgtccatctt cactctgttc atcccacagt |
| 313501 | gcttacctga ggtattattt tgaaatagag tctgggatgg agtctacctt agtgagaatt |
| 313561 | tattagaatt gtttagtctc tgcagaagat gaggtggttg aagcacatac atcacatata |
| 313621 | ctagcagtgc ttttgtataa tttaatatta tcaaattagt acttaagaat ggaaaattct |
| 313681 | gacttataag atctaaattc taattaaggc ttattgttat ctttattgtt ttaaatgata |
| 313741 | atataatgct atagcatgct attcatctga tattttttcc ataatgtgta tggccaccca |
| 313801 | gtaaacacct actgaatatc tactgaaaaa tgaggaactc ttttgttgga aaaatataaa |
| 313861 | atattcatca cataagcaat aatgtataaa tgttacaaaa aagtagtaca ttcattctgc |
| 313921 | cttgtttaga atatgtgaag cctttgcaaa ctaagaaaca tggaaatatt ttgaacatta |
| 313981 | aaatggtaaa tattatggga aagtagagca catttggaca atacagattt ctggccacct |
| 314041 | cattcagaac cattaagcac actgaaagct acgtttttat ttgcctcctg ttcatcttct |
| 314101 | ctctctctct ccttgttttt tttttttttt tttttctgtt ttgtgaacag ctgcagctgc |
| 314161 | tggtcgccag taataagtat cctgagagcc cagaaaaggt acactttgcc ttgctgttta |
| 314221 | aaagtaatgc aatatgtgaa cgcccagaga acaagcactg tggaactgct attttcctgt |
| 314281 | tctacccttg atggattttc aaggtcatgc tggccaatta aggcatcatc agtcctacct |
| 314341 | gagcaacaag aatctaaact ttattccaag tcagaaactg tttctgcaga gccactctct |
| 314401 | cccctgctcc atttcgtgac tttttttttt tttttaacaa attgagttta gaagtgagtg |
| 314461 | taatccagca atacagttta ctggtttagt tggtgggtta attaaaaaaa atttgctcat |
| 314521 | atgaactttc attttatatg tttcttttgc c |

### Pejvakin (PJVK)

[0173] The PJVK gene encodes “pejvakin” (PJVK). PJVK is a member of the gasdermin family, and is required for the proper function of auditory pathway neurons. Mutations in PJVK may lead to non-syndromic sensorineural hearing loss. For example, a v.930_931del AC frameshift mutation in PJVK has been associated with deafness (Zhang et al., Acta Otolaryngol 135(3): 211-216, 2015).

[0174] The human PJVK gene is located on chromosome 2q231. It contains 8 exons encompassing ˜17 kilobases (kb) (NCBI Accession No. NG_012186.1). The full-length wildtype PJVK protein expressed from the human PJVK gene is 352 amino acids in length.

[0175] An exemplary human wildtype PJVK protein is or includes the sequence of SEQ ID NO: 51, SEQ ID NO: 53, SEQ ID NO: 55, SEQ ID NO: 57, SEQ ID NO: 59, or SEQ ID NO: 61. Non-limiting examples of nucleic acid encoding a wildtype PJVK protein are or include SEQ ID NO: 52, SEQ ID NO: 54, SEQ ID NO: 56, SEQ ID NO: 58, SEQ ID NO: 60 and SEQ ID NO: 62.

Human PJVK Protein Isoform 1 (NCBI Accession No. NP_001036167.1)
(SEQ ID NO: 51)
MFAAATKSFVKQVGDGGRLVPVPSLSEADKYQPLSLVVKKKRCFLFPRYKFTSTPFTLKDILLGDREISAG
ISSYQLLNYEDESDVSLYGRRGNHIVNDVGINVAGSDSIAVKASFGIVTKHEVEVSTLLKEITTRKINFDH
SLIRQSRSSRKAVLCVVMESIRTTRQCSLSVHAGIRGEAMRFHFMDEQNPKGRDKAIVFPAHTTIAFSVFE
LFIYLDGAFDLCVTSVSKGGFEREETATFALLYRLRNILFERNRRVMDVISRSQLYLDDLFSDYYDKPLSM
TDISLKEGTHIRVNLLNHNIPKGPCILCGMGNFKRETVYGCFQCSVDGQKYVRLHAVPCFDIWHKRMK
Human PJVK Isoform 1 cDNA
(SEQ ID NO: 52)
atgtttgctgctgctaccaagagctttgtcaagcaagttggagatggagggagattagttcctgttccaag
cctcagtgaagctgacaaatatcaacctctaagtctggtggtaaaaaagaagcgatgctttctgtttccta
gatataaatttacttcaacaccttttacactgaaagatattctcctaggagacagagaaatttcagctggt
atttcatcttatcaattactgaattatgaagatgaatcagatgtttcactctatggaaggcgaggtaacca
tattgtaaatgacgttgggattaacgttgctggatcagattccattgcagtgaaagottcatttggtatag
taaccaaacatgaagtggaagtatcaacattactcaaagaaattactacacgaaaaattaactttgaccac
agottgatacgtcagtcaaggagcagcagaaaggcagtattgtgtgtggtcatggagagcatccgaaccac
acgacagtgctcactgtctgtgcatgctggaattcgaggggaagcaatgoggtttcactttatggatgaac
agaatcccaagggaagggacaaagctattgttttcccagcacatacaaccatagotttcagtgtttttgaa
ctottcatatacctggatggtgcctttgacctttgtgtcacttcagtgtcaaaaggaggatttgaaaggga
agaaacggcaacatttgcactgctgtacaggttgagaaatatcctatttgaaagaaatagaagagtgatgg
atgtcatttctcgttcacagotttacttggatgatcttttttctgactactatgacaaacctctcagcatg
actgatatttcactcaaagaagggacccatatccgagttaacttacttaatcacaacattcccaaagggcc
ttgcatactctgtggaatggggaacttcaaaagggagacagtttatgggtgotttcagtgttctgttgatg
gtcagaagtatgtgagacttcatgcagttccttgttttgatatttggcacaagaggatgaaataa
Human PJIVK Protein Isoform 2 (NCBI Accession No. NP_001340704.1)
(SEQ ID NO: 53)
MAFAWDAAPLSFVKQVGDGGRLVPVPSLSEADKYQPLSLVVKKKRCFLFPRYKFTSTPFTLKDILLGDREI
SAGISSYQLLNYEDESDVSLYGRRGNHIVNDVGINVAGSDSIAVKASFGIVTKHEVEVSTLLKEITTRKIN
FDHSLIRQSRSSRKAVLCVVMESIRTTRQCSLSVHAGIRGEAMRFHFMDEQNPKGRDKAIVFPAHTTIAFS
VFELFIYLDGAFDLCVTSVSKGGFEREETATFALLYRLRNILFERNRRVMDVISRSQLYLDDLFSDYYDKP
LSMTDISLKEGTHIRVNLLNHNIPKGPCILCGMGNFKRETVYGCFQCSVDGQKYVRLHAVPCFDIWHKRMK
Human PJVK Isoform 2 cDNA
(SEQ ID NO: 54)
atggcgtttgcctgggatgcagcacctttgagotttgtcaagcaagttggagatggagggagattagttcc
tgttccaagcctcagtgaagctgacaaatatcaacctctaagtctggtggtaaaaaagaagcgatgctttc
tgtttcctagatataaatttacttcaacaccttttacactgaaagatattctcctaggagacagagaaatt
tcagctggtatttcatcttatcaattactgaattatgaagatgaatcagatgtttcactctatggaaggcg
aggtaaccatattgtaaatgacgttgggattaacgttgctggatcagattccattgcagtgaaagcttcat
ttggtatagtaaccaaacatgaagtggaagtatcaacattactcaaagaaattactacacgaaaaattaac
tttgaccacagottgatacgtcagtcaaggagcagcagaaaggcagtattgtgtgtggtcatggagagcat
ccgaaccacacgacagtgctcactgtctgtgcatgctggaattcgaggggaagcaatgcggtttcacttta
tggatgaacagaatcccaagggaagggacaaagctattgttttcccagcacatacaaccatagctttcagt
gtttttgaactcttcatatacctggatggtgcctttgacctttgtgtcacttcagtgtcaaaaggaggatt
tgaaagggaagaaacggcaacatttgcactgctgtacaggttgagaaatatcctatttgaaagaaatagaa
gagtgatggatgtcatttctcgttcacagctttacttggatgatcttttttctgactactatgacaaacct
ctcagcatgactgatatttcactcaaagaagggacccatatccgagttaacttacttaatcacaacattcc
caaagggccttgcatactctgtggaatggggaacttcaaaagggagacagtttatgggtgctttcagtgtt
ctgttgatggtcagaagtatgtgagacttcatgcagttccttgttttgatatttggcacaagaggatgaaa
taa
Human PJVK Protein Isoform 3 (NCBI Accession No. NP_001340705.1)
(SEQ ID NO: 55)
MYVYRLLSITVLMDILLEGLHSQYFTIYELRITPMAKHFSTQSFVKQVGDGGRLVPVPSLSEADKYQPLSL
VVKKKRCFLFPRYKFTSTPFTLKDILLGDREISAGISSYQLLNYEDESDVSLYGRRGNHIVNDVGINVAGS
DSIAVKASFGIVTKHEVEVSTLLKEITTRKINFDHSLIRQSRSSRKAVLCVVMESIRTTRQCSLSVHAGIR
GEAMRFHFMDEQNPKGRDKAIVFPAHTTIAFSVFELFIYLDGAFDRRVMDVISRSQLYLDDLFSDYYDKPL
SMTDISLKEGTHIRVNLLNHNIPKGPCILCGMGNFKRETVYGCFQCSVDGQKYVRLHAVPCFDIWHKRMK
Human PJVK Isoform 3 cDNA
(SEQ ID NO: 56)
atgtatgtatatagattactatccatcactgttttaatggatatcttattggaagggctacatagtcagta
tttcacaatatatgaactccgcataacacctatggcaaaacatttcagcactcagagotttgtcaagcaag
ttggagatggagggagattagttcctgttccaagcctcagtgaagctgacaaatatcaacctctaagtctg
gtggtaaaaaagaagcgatgotttctgtttcctagatataaatttacttcaacaccttttacactgaaaga
tattctcctaggagacagagaaatttcagctggtatttcatcttatcaattactgaattatgaagatgaat
cagatgtttcactctatggaaggcgaggtaaccatattgtaaatgacgttgggattaacgttgctggatca
gattccattgcagtgaaagottcatttggtatagtaaccaaacatgaagtggaagtatcaacattactcaa
agaaattactacacgaaaaattaactttgaccacagottgatacgtcagtcaaggagcagcagaaaggcag
tattgtgtgtggtcatggagagcatccgaaccacacgacagtgctcactgtctgtgcatgctggaattcga
ggggaagcaatgoggtttcactttatggatgaacagaatcccaagggaagggacaaagctattgttttccc
agcacatacaaccatagotttcagtgtttttgaactottcatatacctggatggtgcctttgatagaagag
tgatggatgtcatttctcgttcacagotttacttggatgatcttttttctgactactatgacaaacctctc
agcatgactgatatttcactcaaagaagggacccatatccgagttaacttacttaatcacaacattcccaa
agggccttgcatactctgtggaatggggaacttcaaaagggagacagtttatgggtgotttcagtgttctg
ttgatggtcagaagtatgtgagacttcatgcagttccttgttttgatatttggcacaagaggatgaaataa
Human PJVK Protein Isoform 4 (NCBI Accession No. NP_001340706.1)
(SEQ ID NO: 57)
MESIRTTRQCSLSVHAGIRGEAMRFHFMDEQNPKGRDKAIVFPAHTTIAFSVFELFIYLDGAFDLCVTSVS
KGGFEREETATFALLYRLRNILFERNRRVMDVISRSQLYLDDLFSDYYDKPLSMTDISLKEGTHIRVNLLN
HNIPKGPCILCGMGNFKRETVYGCFQCSVDGQKYVRLHAVPCFDIWHKRMK
Human PJVK Isoform 4 cDNA
(SEQ ID NO: 58)
atggagagcatccgaaccacacgacagtgctcactgtctgtgcatgctggaattcgaggggaagcaatgcg
gtttcactttatggatgaacagaatcccaagggaagggacaaagctattgttttcccagcacatacaacca
tagotttcagtgtttttgaactottcatatacctggatggtgcctttgacctttgtgtcacttcagtgtca
aaaggaggatttgaaagggaagaaacggcaacatttgcactgctgtacaggttgagaaatatcctatttga
aagaaatagaagagtgatggatgtcatttctcgttcacagotttacttggatgatcttttttctgactact
atgacaaacctctcagcatgactgatatttcactcaaagaagggacccatatccgagttaacttacttaat
cacaacattcccaaagggccttgcatactctgtggaatggggaacttcaaaagggagacagtttatgggtg
ctttcagtgttctgttgatggtcagaagtatgtgagacttcatgcagttccttgttttgatatttggcaca
agaggatgaaataa
Human PJVK Protein Isoform 5 (NCBI Accession No. NP_001340707.1)
(SEQ ID NO: 59)
MESIRTTRQCSLSVHAGIRGEAMRFHFMDEQNPKGRDKAIVFPAHTTIAFSVFELFIYLDGAFDLCVTSVS
KGGFEREETATFALLYRLRNILFERNRRVMDVISRSQLYLDDLFSDYYDKPLSMTDISLKEGTHIRVNLLN
HNIPKGPCILCGMGNFKRETVYGCFQCSVDGQKYVRLHAVPCFDIWHKRMK
Human PJVK Isoform 5 cDNA
(SEQ ID NO: 60)
atggagagcatccgaaccacacgacagtgctcactgtctgtgcatgctggaattcgaggggaagcaatgcg
gtttcactttatggatgaacagaatcccaagggaagggacaaagctattgttttcccagcacatacaacca
tagotttcagtgtttttgaactottcatatacctggatggtgcctttgacctttgtgtcacttcagtgtca
aaaggaggatttgaaagggaagaaacggcaacatttgcactgctgtacaggttgagaaatatcctatttga
aagaaatagaagagtgatggatgtcatttctcgttcacagotttacttggatgatcttttttctgactact
atgacaaacctctcagcatgactgatatttcactcaaagaagggacccatatccgagttaacttacttaat
cacaacattcccaaagggccttgcatactctgtggaatggggaacttcaaaagggagacagtttatgggtg
ctttcagtgttctgttgatggtcagaagtatgtgagacttcatgcagttccttgttttgatatttggcaca
agaggatgaaataa
Human PJVK Protein Isoform 6 (NCBI Accession No. NP_001356841.1)
(SEQ ID NO: 61)
MFAAATKSFVKQVGDGGRLVPVPSLSEADKYQPLSLVVKKKRCFLFPRYKFTSTPFTLKDILLGDREISAG
ISSYQLLNYEDESDVSLYGRRGNHIVNDVGINVAGSDSIAVKASFGIVTKHEVEVSTLLKEITTRKINFDH
SLIRQSRSSRKAVLCVVMESIRTTRQCSLSVHAGIRGEAMRFHFMDEQNPKGRDKAIVFPAHTTIAFSVFE
LFIYLDGAFDLCVTSVSKGGFEREETATFALLYRLRNILFERNRRVMDVISRSQLYLDDLFSDYYDKPLSM
TDISLKEGTHIRVNLLNHNIPKGPCILCGMGNFKRETVYGCFQCSVDGQKYVRLHAVPCFDIWHKRMK
Human PJVK Isoform 6 cDNA
(SEQ ID NO: 62)
atgtttgctgctgctaccaagagctttgtcaagcaagttggagatggagggagattagttcctgttccaag
cctcagtgaagctgacaaatatcaacctctaagtctggtggtaaaaaagaagcgatgctttctgtttccta
gatataaatttacttcaacaccttttacactgaaagatattctcctaggagacagagaaatttcagctggt
atttcatcttatcaattactgaattatgaagatgaatcagatgtttcactctatggaaggcgaggtaacca
tattgtaaatgacgttgggattaacgttgctggatcagattccattgcagtgaaagottcatttggtatag
taaccaaacatgaagtggaagtatcaacattactcaaagaaattactacacgaaaaattaactttgaccac
agottgatacgtcagtcaaggagcagcagaaaggcagtattgtgtgtggtcatggagagcatccgaaccac
acgacagtgctcactgtctgtgcatgctggaattcgaggggaagcaatgoggtttcactttatggatgaac
agaatcccaagggaagggacaaagctattgttttcccagcacatacaaccatagotttcagtgtttttgaa
ctottcatatacctggatggtgcctttgacctttgtgtcacttcagtgtcaaaaggaggatttgaaaggga
agaaacggcaacatttgcactgctgtacaggttgagaaatatcctatttgaaagaaatagaagagtgatgg
atgtcatttctcgttcacagotttacttggatgatcttttttctgactactatgacaaacctctcagcatg
actgatatttcactcaaagaagggacccatatccgagttaacttacttaatcacaacattcccaaagggcc
ttgcatactctgtggaatggggaacttcaaaagggagacagtttatgggtgotttcagtgttctgttgatg
gtcagaagtatgtgagacttcatgcagttccttgttttgatatttggcacaagaggatgaaataa

[0176] In some embodiments of any of the compositions described herein, the PJVK protein comprises a sequence that is at least 75% (e.g., at least 80%, at least 85%, at least 90%, at least 91%, at least 92%, at least 93%, at least 94%, at least 95%, at least 96%, at least 97%, at least 98%, at least 99%) identical to SEQ ID NO: 51.

[0177] In some embodiments of any of the compositions described herein, the PJVK protein comprises a sequence that is at least 75% (e.g., at least 80%, at least 85%, at least 90%, at least 91%, at least 92%, at least 93%, at least 94%, at least 95%, at least 96%, at least 97%, at least 98%, at least 99%) identical to SEQ ID NO: 53.

[0178] In some embodiments of any of the compositions described herein, the PJVK protein comprises a sequence that is at least 75% (e.g., at least 80%, at least 85%, at least 90%, at least 91%, at least 92%, at least 93%, at least 94%, at least 95%, at least 96%, at least 97%, at least 98%, at least 99%) identical to SEQ ID NO: 55.

[0179] In some embodiments of any of the compositions described herein, the PJVK protein comprises a sequence that is at least 75% (e.g., at least 80%, at least 85%, at least 90%, at least 91%, at least 92%, at least 93%, at least 94%, at least 95%, at least 96%, at least 97%, at least 98%, at least 99%) identical to SEQ ID NO: 57.

[0180] In some embodiments of any of the compositions described herein, the PJVK protein comprises a sequence that is at least 75% (e.g., at least 80%, at least 85%, at least 90%, at least 91%, at least 92%, at least 93%, at least 94%, at least 95%, at least 96%, at least 97%, at least 98%, at least 99%) identical to SEQ ID NO: 59.

[0181] In some embodiments of any of the compositions described herein, the PJVK protein comprises a sequence that is at least 75% (e.g., at least 80%, at least 85%, at least 90%, at least 91%, at least 92%, at least 93%, at least 94%, at least 95%, at least 96%, at least 97%, at least 98%, at least 99%) identical to SEQ ID NO: 61.

[0182] A non-limiting example of a human wildtype PJVK genomic DNA sequence is SEQ ID NO: 63. The exons in SEQ ID NO: 63 are: nucleotide positions 5001-5334 (exon 1); nucleotide positions 6953-7185 (exon 2) and nucleotide positions 7897-8092 (exon 3); nucleotide positions 8281-9208 (exon 4); nucleotide positions 9575-9716 (exon 5); nucleotide positions 12075-12192 (exon 6); nucleotide positions 13913-14011 (exon 7); and nucleotide positions 14547-15131 (exon 8). The introns in SEQ ID NO: 63 are: nucleotide positions 1-5000 (intron 1); nucleotide positions 5335-6952 (intron 2); nucleotide positions 7186-7896 (intron 3); nucleotide positions 8093-8280 (intron 4); nucleotide positions 9209-9574 (intron 5); nucleotide positions 9717-12074 (intron 6); nucleotide positions 12193-13912 (intron 7); and nucleotide positions 14012-14546 (intron 8).

| Human PJVK Gene Sequence (NCBI Reference Sequence: NG_012186.1) | |
|---|---|
| (SEQ ID NO: 63) | |
| 1 | tttcttgccg ggagagaggg attagaggga ttgtcoggcg tgggtctagg gtcgttgagg |
| 61 | cctaaagtta agcctttgtg gggaggacgg attgggggct gggtcacttt aagaaaaaga |
| 121 | ttctaaaatt acgaaggcag aattccaggg agtctccojg gcctggtcct gaagcttgag |
| 181 | accccggata tatacgctcc agggggctgc ggtgcgctct tcgggtcccc gagccctgtg |
| 241 | tttaggaaca cgoggggacg tccaaacacc cgctoctotc ccgccgggcg ggctcctttg |
| 301 | tcttctgggc tttcgtcgcg agatggaacg ctgggtcagt gcatcccagc aaaacacgtt |
| 361 | aggagtaaac gaaggccttt cojgggacct gggtagtojg ttgtaatggc gtttgcctgg |
| 421 | gatgcagcac ctttggtggg ccattagatg acgtgtcgct tctccagggg cttgctaggc |
| 481 | actagcagaa atgctcccct gtgcttactc ggtgttatgg aagattgctt gcacaatgct |
| 541 | attcgtacga aaggatatta ttaaaagtga tttatgggcg ggcgcggtgg ctcacgcctg |
| 601 | taatcccagc actttaggag gccgaggctg gcggatcgcc tgaagtaagc agttcgagac |
| 661 | cagcctggcc aacatggtga aaccctgtct ctactaaaaa tacaaaaatt agccgggcgt |
| 721 | ggtggcatgc gcctgtaatc ccagctactc gggaggctaa agcaggagaa tcgcttgaac |
| 781 | cojggaggca aabittgcag tgagccgaga tcgcgccact gcactccagc ctgggcgaca |
| 841 | gagtcagact ccctctcaaa aaaaaaaaaa aaaaaaaaag cgatttgttg ttttgttagc |
| 901 | atgtaagccc tggatgcttg aaacaagtga aagatgttca gaatctaatc aaattatatc |
| 961 | atctgatgct ttaattagag cctattctct cttcctctcc gtctatatat gtatgtatat |
| 1021 | agattactat ccatcactgt tttaatggat atcttattgg aagggctaca tagtcagtat |
| 1081 | ttcacaatat atgaactccg cataacacct atggcaaaac atttcagcac tcaggtaaaa |
| 1141 | ttcatttttt gccacaaaat tacttaaaaa caggccagaa ctttatatag ctcttgttaa |
| 1201 | aggttaagta gcbjggataa taatgaaaca aaaagatgca gcaggactcc atttcaaaga |
| 1261 | gagagagtct gtgtgcccaa cttcagagta agaaaccact aggtaatagt ttatatagtt |
| 1321 | acttatatgt aatgtggctt tattttttaa ataaagattt gcatataatt gtttatatct |
| 1381 | gtgaatttat atttaatatt aaacacagtt ttgtaagcat ataagatgga aaatgaatga |
| 1441 | aatgctcaat caatgagctg tatgccatga ggattcaaaa cagcactttg gtgttgccaa |
| 1501 | aattccggtg gtggacttgt gaaggaattc cctttggact aggtccactg tagattgtat |
| 1561 | cojggactat cgttagtgcc taaattgcat tgcttcccac agcactatat gcttccctta |
| 1621 | aaattggccc attgccagtg gcaaatcact atctactgtg atccttatca tagacattgg |
| 1681 | tcatattttt acgttattag ttttctgtgt atattttagt gctatagcct gccattccaa |
| 1741 | gttaaacatg ctcttagcat atcattttac accgttgatc tataattcat tacctgagca |
| 1801 | catgagcaga ggcagggaat tatacagtgg taaactactt ggtgaaacca tgctttgtat |
| 1861 | ttttaagatg tataattata tttaaaaaca agcaatgctt aattttgtgc ctgattttcc |
| 1921 | tctttaaaaa tggatttatc tgggggttgc agttgatgac gttttgattt taatatgttt |
| 1981 | gctgctgcta ccaagagctt tgtcaagcaa gttggagatg gagggagatt agttcctgtt |
| 2041 | ccaagcctca gtgaagctga caaatatcaa cctctaagtc tggtggtaaa aaagaagcga |
| 2101 | tgctttctgt ttcctagata taaatttact tcaacacctt ttacactgaa agatattctc |
| 2161 | ctaggagaca gagaaatttc agctggtaag tttaaatgtt tgggagtgcc aactcattca |
| 2221 | tctgtattat tggcaaccta aacataggtc atatatgcta cttatgttag taatacacat |
| 2281 | tttcaatgat taaagcaact tttattatga bittagtgta ataacattat taagattaac |
| 2341 | aatgccaaaa gtttgtataa tatcaaatct cttattggtc aaataatttt caaatctatc |
| 2401 | aattatttta taaattgttt taaccaaatc aacttagaat atgacatatt tcttcatcta |
| 2461 | taaaatggga tattatttgg gcttacctat gttacatggt caaatgagat gaaaataatt |
| 2521 | tgtatttatt ttttacaatt caattattac aattggtaaa ctgaaatgta ttgaagggta |
| 2581 | ggttatataa taagctgata ttttgatgag ttactactta taaacgctta ttttttcttt |
| 2641 | taattgcccg gtggatcttg atgcttaaga agttctgttg gctgaataga aaatttgagt |
| 2701 | tccttttaag aattctggct atgtgtttct ttttgttgta agattaattg aattactact |
| 2761 | ttaagtcttg gtgagtcatg ttgcctttct ctaacatttg ggtatttgag tcttcaattg |
| 2821 | ttaatttaac atgttactat atataatcta cataagataa agatgtttaa aaaatactga |
| 2881 | gtttcttctt ataaaggtat ttcatcttat caattactga attatgaaga tgaatcagat |
| 2941 | gtttcactct atggaaggcg aggtaaccat attgtaaatg acgttgggat taacgttgct |
| 3001 | ggatcagatt ccattgcagt gaaagcttca tttggtatag taaccaaaca tgaagtggaa |
| 3061 | gtatcaacat tactcaaaga aattactaca cggtcagtat aataatccta atatatttca |
| 3121 | gtgttttcat taaatacttt aggtatataa acttcattac aaagaatgct taaaacattg |
| 3181 | aggttgtatt ttactagtgt aatttgctag atatgtttga aatacattgg tagtatatcc |
| 3241 | aaactttgaa taaggataga tatcaaaaat cacttggctg aagtcagaga cctcagggcc |
| 3301 | ccagatcaag gagctaactg atgaagaggc agagaggctg cagctagaga ttgaccagaa |
| 3361 | ataggatgca gagaatcatg aggcccagat caagaatggc agccttgact ccccagggaa |
| 3421 | gcagaagact gaggaagatg aggaggagga agatgagaag gacaaaggaa aactgaagcc |
| 3481 | caacctaggc aacagggcag acctgcctga ttaccgctgg accaagaccc tgtcggagct |
| 3541 | ggacctggcg gtccctttct gtgtggactt ccagctgaaa gggaaggacg tggtggtggc |
| 3601 | atccaacggc ggcacctcca ggtggggctc aaggggcagc cagcgatcat cgatggggag |
| 3661 | ctctacaacg aagtgaaggc ggaggagagc tcgtggctca ttgaggacgg caaggtggtg |
| 3721 | actgtgcatc tggagaagat caagaagatg gagtggtgga gccgcttggt gtccagtgac |
| 3781 | cctgagatca ataccaagaa gattaaccct gagaattcca agctgtcaga cctggacagt |
| 3841 | gagactcaca tcatggtgga aaagacaatc tatgaccagt aacagaagtc catggggctg |
| 3901 | ccaacctcag acgaacagaa gaaacaggag attctgaaga agttcatgga tcagcatccg |
| 3961 | gagatggatt tttccaaggc taaattcaac tagcccctgt ttttccctcc ctgaactctt |
| 4021 | ggggctgagc tgcaaccacc caactttctt tcccactctt ctctgggact tgtgggcctc |
| 4081 | agggcttggg gcaggcatgg gactggccca ggcacacagg tcccagggca tcaggagaaa |
| 4141 | ggctggggct tggggtcttg tcctccccag ttggcctact gttacacatt aaaatgattt |
| 4201 | gcccagctaa aaaaaaaaaa aaaccacttg gcttaaacaa aacttttaat tgttccacaa |
| 4261 | aattactttg gctctacaca catttgctta attattagat ttaaataata cagcaatctg |
| 4321 | tctgcaacaa atagagtccc cttcaacaga ctttcaacag acagagtgaa acattctgca |
| 4381 | taagcatgtt ttaagaaaat agagaggaga gacaaattat tacatttctt ttgggtgtat |
| 4441 | tttctgacta ttaggattgc cttgatttac tattaggtga actatgaatg aataacacat |
| 4501 | gatagcaaaa aatgtatttg attatgtgta attagatgtt atagagtctt gtgaatgtat |
| 4561 | cttctttatt ttagaaaaat taactttgac cacagcttga tacgtcagtc aaggagcagc |
| 4621 | agaaaggcag tattgtgtgt ggtcatggag agcatccgaa ccacacgaca gtgctcactg |
| 4681 | tctgtgcatg ctggaattcg aggggaagca atgcgggtaa accacacttg ttgggttctc |
| 4741 | ttactaacta aagtgttgcc atgggaattt ttttaagtat tgaatttcta gtcaggcttg |
| 4801 | tgtattttgt gaaatgttct gatgaaagag ctgcagttgt ataggatttt gcacagcaat |
| 4861 | gtctgttcta gaatatgaaa aaaaaaaaca aatcttggga ttctaaacat gtgtaatata |
| 4921 | atgcaaaaac agtaatcctt gtgaaattac gtgcatactg gagtccctca agttactatt |
| 4981 | taagtgttgt tttaagaata aaaattgagt gagttgaatt gattttattt ttaagtgata |
| 5041 | cagtttttga ctgggcacag tggctcacgc ctgtaatcct agcattttgg gaggccgagg |
| 5101 | tgggcggatc acttgcagtc aggagttgga gatcaagttg ggcaacacag agaaacccca |
| 5161 | tctctactga aaatacaaaa attagccagg tgtggtggta cacccctgta atcccaagcc |
| 5221 | actcaggaag ctgaggcaca agaatcactt gaacctggga ggtggaggtt gcagtgagcc |
| 5281 | gagattgtgc cattgcactc taacctgggt ggcagagtga gactccgtct caaaaaaaca |
| 5341 | aaacaaaaca aaaaccccaa ccaaaaaaaa aatgtgtaac ataatgcaaa aacagtaatc |
| 5401 | cttgtgaaat tacatgcata ctggagtccc tcatattact atttaagtgc tgttttaaga |
| 5461 | ataaaaattg agtgcttaag ttgaattgat ttaagtgata gagtttttac actttgaatt |
| 5521 | ttttaaagct gaatttatag attttttttt tgagacggag tctcgctctg tccccgaggc |
| 5581 | tggagtgcag tggcgcgatc ttggctcact gcaaactccg cctccojggt tcatgccatt |
| 5641 | cttctgcctc agcctcccga gtagcbjgga ctacaggcac ctgccaccac gcccggcagt |
| 5701 | gttatccagg atggtttcga tctcctgacc tcgtgatccg ctagcctojg cctcccaaaa |
| 5761 | tgctgggatt acaggtgtga gccaccgcgc ctggcctgaa tttatatttt tatattcaaa |
| 5821 | tagtttttca aagttaatat tatcaatggc catacatgct ttattcaagg ttagttaaat |
| 5881 | cctttaaaaa atattagcgg caaggtgcag tggatcatgc ctgtaatccc agtgcttagg |
| 5941 | aagactgaga taggaagaca gcttgggacc aggagttcaa gaccaacttg agcaaaataa |
| 6001 | tgagaccttg tctctacaaa aaataaaaga attagctggt tgtggtggca catgcctata |
| 6061 | gtcccagcta ctcggaaggc tgaggcaggg ggctgcctgc ggggtttggg tcattgtctt |
| 6121 | ttagaatttg ggaggctttg aaaagccgtg cttttgtgct ggggaagatg tagcagtctc |
| 6181 | ttctccaaac cacccatttg ccttcggact tctctggggc cagcagccat ccaactaggg |
| 6241 | gccojgggcc acgggctcag ctgacgacca tgggcttcgc gtccaaccag cagtttgcag |
| 6301 | gttcgagctc aggacttggc ggggacacct taggatgcag gagtggccag gagttcaagg |
| 6361 | ttacagtagg ctatgattgt gccactgctc tccagcctgg gtgacagaga gagaccctgt |
| 6421 | ctctgaaaaa aaaattggaa aagtatctgt gtttaatttt cagctcaatt atgatattgt |
| 6481 | ttatctttgt cattcagtga cacctaataa tgacttgatt ggattaaaac caattgttag |
| 6541 | aaagataggg ttcaaggata atcttttcaa gtctttgcaa ataaaagtta ttttcgcata |
| 6601 | ttcagctgcc tgtcaaattc tgattaacat tggatcattt ttgaggcaca aactgaaaca |
| 6661 | tttacttgat tgttagcgat tgctttagaa agctactaaa agctctggag ggctttggaa |
| 6721 | tggtagacag gctaggctga aaactttaac tctggcactg ctttctaaga tttcctgtta |
| 6781 | aaaaaaaaaa aaaggcttct gctccagagc attatggttg tggtagcact aatcatgggc |
| 6841 | tgtaatacca aagtaagtga aaagtgcaga ggtatttcct aatatagacc aggagtttct |
| 6901 | gttggaccaa ttggatctct gctataaaaa atggtttaat tcaagcagaa taatccttta |
| 6961 | cttgggaatt ttttgttttg tttttggtag gattatagga aatgtttcat ttctccaaaa |
| 7021 | agctatcctt acatgttatg atccttaatt atgttattta tttattcaat atagtttcac |
| 7081 | tttatggatg aacagaatcc caagggaagg gacaaagcta ttgttttocc agcacataca |
| 7141 | accatagctt tcagtgtttt tgaactcttc atatacctgg atggtgcctt tggtgagtta |
| 7201 | agggtctgca tgaaatacaa atgattatat ttttaaggag cattcattag ggcatgtgct |
| 7261 | ctctctctct cttttctctc atttctcgtg tctaacaatt atagaagatg ctctcagcac |
| 7321 | tgtcaatctt atgctttggc aaaatagctg agaaagaccc tccgttcgct gcttccccat |
| 7381 | tccacttttc tgcttcttgg tgaaggttgt aaactctcca ctaccccatt taaaattata |
| 7441 | aataagagct aaaatgccat ctactgacaa agtattcctt agcttacatg gggagataat |
| 7501 | aaatgacctt cttataggta gtttttgatg gtggcaaaca gaggagtagg tagatagtag |
| 7561 | gatgcctgaa gtgttaggat gcccaaacca gggcctctaa agacagcttt tcttacttca |
| 7621 | gttttactta tcatagaccc agcttcccct tgcactcttc ctaaaaaata actttaaaaa |
| 7681 | gtgaaaatac ttcctccaaa attgtcacct tgtataatac ctaagtgcag ctcactttag |
| 7741 | gtctctacat ttcacaggtc tttaaggtct gttggccaac tggaacaagt ccaggtgtag |
| 7801 | cccaagggat caggaaaggc agcccctagc catggtaatt tacaaatgtt tttagacctg |
| 7861 | ttcttgttca tttctgcaat tttgtaggag gagggaatag ggagtccaga aacaaaacaa |
| 7921 | aactacatgt taagtaaatt gtctttttaa aaaatatttt taatttttgt ggctatatag |
| 7981 | tagattatat atatatttat gtatgggata catgaggtat tttgatacgg gcatacagtg |
| 8041 | cataataatc acatcatgga aaatggggta tccatcccct caagcattta tcctttgtgt |
| 8101 | tacaaacaat ccaattatac tcttttagtt atttaaaaat gtacaaattc tcagtctaag |
| 8161 | atggagaaaa aactgtacaa ttacattatt ttgactgtag tcaccctatt atgcttccaa |
| 8221 | atactaggtc ttattaagta aattctaatt ggataacttt aggtttttac agttttattg |
| 8281 | atggttggga ggaatgtaaa tggactgata tatccacaag aatttaaaat atatatataa |
| 8341 | tttggacttc cacttctagg aatttatcct acagatatat ttacacatat atgaaatgat |
| 8401 | atgagtgcaa gtatattcag tcctcaataa caagagattg gaaacaacat taaggagact |
| 8461 | aaataatggt gcatccttgc aagagaatac tatgaagcca ataagaatat aatactttta |
| 8521 | atagatattt ttcaagagct gagtataata tgtaactatt tgggcataaa taattttata |
| 8581 | cacatacatg tatatatgca tctttcttta tgcttataaa atatatggag tatttctgga |
| 8641 | agcaaacata agaaacttaa accacgggtg cccctaagcc cctgaggtag aagactgtgg |
| 8701 | ctggatacag ggtgggccag agacctattt gtcactgtat ctcctttctg tatgaatttt |
| 8761 | gtaccatgtg aatgttacct tttccaaaag tatgtaaaag tcaactttta aaaacaatac |
| 8821 | aatgaatgat ttgtactaga attcatcacc ccatcaaaca ataaaatatg aattattcaa |
| 8881 | gttataacat cttctaacaa ttttttttgt agacctttgt gtcacttcag tgtcaaaagg |
| 8941 | aggatttgaa agggaagaaa cggcaacatt tgcactgctg tacaggttga gaaatatcct |
| 9001 | atttgaaaga agtatgttta ttgaagagta ctgtgaatgt cttttttttt tctttcctgg |
| 9061 | cttaacacat gaggttttct attcagtaat ctcatctgtt aaggaaaaat ttaaatttaa |
| 9121 | aagcctggct ggtatggtgg ctcatgccta taatcccagc actttgggag gccagggcag |
| 9181 | gcagattgct agcactcaga agtttgaaac acttgggcaa tgtgagaaaa ccccatctgt |
| 9241 | acaaagaata caaaagaaaa aaaattagtt ggttgcagtg gtgtgcacct gtagtcccag |
| 9301 | ctacttgaga ggctgaggta ggaggatcac ttgagcgtgg gaggcggagg ttgtagtaag |
| 9361 | tggagattgt gccactgccc tccagottgg gtgacagagc cagaccctgt ctcaaaaaaa |
| 9421 | aaaaaaaaaa aaaaaaagcc aaattatttc atgactagtg gattcacata tttattaatg |
| 9481 | ctgtttgcat tatgtatttt tcattttcac ttctaacaca tttcttttct gtttttgtcc |
| 9541 | ttttagatag aagagtgatg gatgtcattt ctcgttcaca gctttacttg gatgatcttt |
| 9601 | tttctgacta ctatgacaaa cctctcagca tgactgatat ttcactcaaa gaagggaccc |
| 9661 | atatccgagt taacttactt aatcacaaca ttcccaaagg gccttgcata ctctgtggaa |
| 9721 | tggggaactt caaaagggag acagtttatg ggtgctttca gtgttctgtt gatggtcaga |
| 9781 | agtatgtgag acttcatgca gttccttgtt ttgatatttg gcacaagagg atgaaataaa |
| 9841 | atgaaaaatg aatacaccgt gttggtgttt taggtgcagt tgtgccacaa accttcccta |
| 9901 | aattatctag gtttgctttg atgaattaaa ttaaaatgag aaaagcaaaa agaaattaac |
| 9961 | ctgtctgggt atcatattcc ctatctataa agtagcaatt ataacagtag tgtctatttc |
| 10021 | ttaagttgtc atgaaaatta ataacattgt ttatatcaaa aaagatttac atataaaatt |
| 10081 | cagagattat gaatcatgcc agtcacttta gaatcatttt tgggatgtag t |

Heat Shock Protein Family A (Hsp70) member 1A (HSPA1A)

[0183] The HSPA1A gene encodes “heat shock protein family A member 1A” (HSPA1A). The human HSPA1A gene is located on chromosome 6p21.33. It contains 1 exon, encompassing ˜2400 bp (NCBI Accession No. NC 000006.12). HSPA1A encodes a 70 kDa heat shock protein, which stabilizes proteins against protein aggregation and is involved in protein folding.

[0184] Exemplary wildtype HSPA1A protein sequences are or include SEQ ID NO: 64, SEQ ID NO: 66, SEQ ID NO: 68, SEQ ID NO: 69, SEQ ID NO: 70, and SEQ ID NO: 93. Exemplary DNA sequences that encode a NDP protein are shown below.

Human Mature HSPA1A Protein (NCBI Accession No. NP_005336.3)
(SEQ ID NO: 64)
MAKAAAIGIDLGTTYSCVGVFQHGKVEIIANDQGNRTTPSYVAFTDTERLIGDAAKNQVALNPQNTVFDAK
RLIGRKFGDPVVQSDMKHWPFQVINDGDKPKVQVSYKGETKAFYPEEISSMVLTKMKEIAEAYLGYPVTNA
VITVPAYFNDSQRQATKDAGVIAGLNVLRIINEPTAAAIAYGLDRTGKGERNVLIFDLGGGTFDVSILTID
DGIFEVKATAGDTHLGGEDFDNRLVNHFVEEFKRKHKKDISQNKRAVRRLRTACERAKRTLSSSTQASLEI
DSLFEGIDFYTSITRARFEELCSDLFRSTLEPVEKALRDAKLDKAQIHDLVLVGGSTRIPKVQKLLQDFFN
GRDLNKSINPDEAVAYGAAVQAAILMGDKSENVQDLLLLDVAPLSLGLETAGGVMTALIKRNSTIPTKQTQ
IFTTYSDNQPGVLIQVYEGERAMTKDNNLLGRFELSGIPPAPRGVPQIEVTFDIDANGILNVTATDKSTGK
ANKITITNDKGRLSKEEIERMVQEAEKYKAEDEVQRERVSAKNALESYAFNMKSAVEDEGLKGKISEADKK
KVLDKCQEVISWLDANTLAEKDEFEHKRKELEQVCNPIISGLYQGAGGPGPGGFGAQGPKGGSGSGPTIEE
VD
Human Mature HSPA1A cDNA
(SEQ ID NO: 65)
atggccaaagccgcggcgatcggcatcgacctgggcaccacctactcctgcgtgggggtgttccaacacgg
caaggtggagatcatcgccaacgaccagggcaaccgcaccaccoccagctacgtggccttcacggacaccg
agoggctcatcggggatgcggccaagaaccaggtggcgctgaacccgcagaacaccgtgtttgacgcgaag
cggctgatcggccgcaagttcggcgaccoggtggtgcagtoggacatgaagcactggcctttccaggtgat
caacgacggagacaagcccaaggtgcaggtgagctacaagggggagaccaaggcattctaccccgaggaga
tctcgtccatggtgctgaccaagatgaaggagatcgccgaggcgtacctgggctaccoggtgaccaacgcg
gtgatcaccgtgccggcctacttcaacgactcgcagcgccaggccaccaaggatgogggtgtgatcgcggg
gctcaacgtgctgoggatcatcaacgagcccacggccgccgccatcgcctacggcctggacagaacgggca
agggggagcgcaacgtgctcatctttgacctgggcgggggcaccttcgacgtgtccatcctgacgatcgac
gacggcatcttcgaggtgaaggccacggccggggacacccacctgggtggggaggactttgacaacaggct
ggtgaaccacttcgtggaggagttcaagagaaaacacaagaaggacatcagccagaacaagcgagccgtga
ggcggctgcgcaccgcctgcgagagggccaagaggaccctgtcgtccagcacccaggccagcctggagatc
gactocctgtttgagggcatcgacttctacacgtccatcaccagggcgaggttcgaggagctgtgctccga
cctgttccgaagcaccctggagcccgtggagaaggctctgcgcgacgccaagctggacaaggcccagattc
acgacctggtoctggtogggggctccacccgcatccccaaggtgcagaagctgctgcaggacttcttcaac
gggcgcgacctgaacaagagcatcaaccccgacgaggctgtggcctacggggcggcggtgcaggcggccat
cctgatgggggacaagtccgagaacgtgcaggacctgctgctgctggacgtggctoccctgtcgctggggc
tggagacggccggaggcgtgatgactgccctgatcaagcgcaactccaccatccccaccaagcagacgcag
atcttcaccacctactccgacaaccaaccoggggtgctgatccaggtgtacgagggcgagagggccatgac
gaaagacaacaatctgttggggcgcttcgagctgagoggcatccctccggcccccaggggcgtgccccaga
tcgaggtgaccttcgacatcgatgccaacggcatcctgaacgtcacggccacggacaagagcaccggcaag
gccaacaagatcaccatcaccaacgacaagggccgcctgagcaaggaggagatcgagcgcatggtgcagga
ggcggagaagtacaaagoggaggacgaggtgcagcgcgagagggtgtcagccaagaacgccctggagtcct
acgccttcaacatgaagagcgccgtggaggatgaggggctcaagggcaagatcagcgaggcggacaagaag
aaggttctggacaagtgtcaagaggtcatctcgtggctggacgccaacaccttggccgagaaggacgagtt
tgagcacaagaggaaggagctggagcaggtgtgtaaccccatcatcagoggactgtaccagggtgccggtg
gtccogggcctgggggcttcggggctcagggtcccaagggagggtctgggtcaggccccaccattgaggag
gtggattag
Human Mature HSPA1A cDNA
(SEQ ID NO: 94)
atgtaccggatgcagctgctgagctgtatcgccctgtctctggccctggtcaccaattctgccaaagccgc
ggcgatcggcatcgacctgggcaccacctactcctgcgtgggggtgttccaacacggcaaggtggagatca
tcgccaacgaccagggcaaccgcaccaccoccagctacgtggccttcacggacaccgagcggctcatcggg
gatgoggccaagaaccaggtggcgctgaacccgcagaacaccgtgtttgacgcgaagoggctgatcggccg
caagttcggcgacccggtggtgcagtcggacatgaagcactggcctttccaggtgatcaacgacggagaca
agcccaaggtgcaggtgagctacaagggggagaccaaggcattctaccccgaggagatctcgtccatggtg
ctgaccaagatgaaggagatcgccgaggcgtacctgggctacccggtgaccaacgcggtgatcaccgtgcc
ggcctacttcaacgactcgcagcgccaggccaccaaggatgcgggtgtgatcgcggggctcaacgtgctgc
ggatcatcaacgagcccacggccgccgccatcgcctacggcctggacagaacgggcaagggggagcgcaac
gtgctcatctttgacctgggcgggggcaccttcgacgtgtccatcctgacgatcgacgacggcatcttcga
ggtgaaggccacggccggggacacccacctgggtggggaggactttgacaacaggctggtgaaccacttcg
tggaggagttcaagagaaaacacaagaaggacatcagccagaacaagcgagccgtgaggcggctgcgcacc
gcctgcgagagggccaagaggaccctgtcgtccagcacccaggccagcctggagatcgactccctgtttga
gggcatcgacttctacacgtccatcaccagggcgaggttcgaggagctgtgctccgacctgttccgaagca
ccctggagcccgtggagaaggctctgcgcgacgccaagctggacaaggcccagattcacgacctggtcctg
gtcgggggctccacccgcatccccaaggtgcagaagctgctgcaggacttcttcaacgggcgcgacctgaa
caagagcatcaaccccgacgaggctgtggcctacggggcggcggtgcaggcggccatcctgatgggggaca
agtccgagaacgtgcaggacctgctgctgctggacgtggctcccctgtcgctggggctggagacggccgga
ggcgtgatgactgccctgatcaagcgcaactccaccatccccaccaagcagacgcagatcttcaccaccta
ctccgacaaccaacccggggtgctgatccaggtgtacgagggcgagagggccatgacgaaagacaacaatc
tgttggggcgcttcgagctgagcggcatccctccggcccccaggggcgtgccccagatcgaggtgaccttc
gacatcgatgccaacggcatcctgaacgtcacggccacggacaagagcaccggcaaggccaacaagatcac
catcaccaacgacaagggccgcctgagcaaggaggagatcgagcgcatggtgcaggaggcggagaagtaca
aagcggaggacgaggtgcagcgcgagagggtgtcagccaagaacgccctggagtcctacgccttcaacatg
aagagcgccgtggaggatgaggggctcaagggcaagatcagcgaggcggacaagaagaaggttctggacaa
gtgtcaagaggtcatctcgtggctggacgccaacaccttggccgagaaggacgagtttgagcacaagagga
aggagctggagcaggtgtgtaaccccatcatcagcggactgtaccagggtgccggtggtcccgggcctggg
ggcttcggggctcagggtcccaagggagggtctgggtcaggccccaccattgaggaggtggattaa

[0185] In some embodiments of any of the compositions described herein, the HSPA1A protein comprises a sequence that is at least 75% (e.g., at least 80%, at least 85%, at least 90%, at least 91%, at least 92%, at least 93%, at least 94%, at least 95%, at least 96%, at least 97%, at least 98%, at least 99%) identical to SEQ ID NO: 64.

[0186] In some embodiments of any of the compositions described herein, the HSPA1A protein comprises a sequence that is at least 75% (e.g., at least 80%, at least 85%, at least 90%, at least 91%, at least 92%, at least 93%, at least 94%, at least 95%, at least 96%, at least 97%, at least 98%, at least 99%) identical to SEQ ID NO: 66.

[0187] In some embodiments of any of the compositions described herein, the HSPA1A protein comprises a sequence that is at least 75% (e.g., at least 80%, at least 85%, at least 90%, at least 91%, at least 92%, at least 93%, at least 94%, at least 95%, at least 96%, at least 97%, at least 98%, at least 99%) identical to SEQ ID NO: 68.

[0188] In some embodiments of any of the compositions described herein, the HSPA1A protein comprises a sequence that is at least 75% (e.g., at least 80%, at least 85%, at least 90%, at least 91%, at least 92%, at least 93%, at least 94%, at least 95%, at least 96%, at least 97%, at least 98%, at least 99%) identical to SEQ ID NO: 69.

[0189] In some embodiments of any of the compositions described herein, the HSPA1A protein comprises a sequence that is at least 75% (e.g., at least 80%, at least 85%, at least 90%, at least 91%, at least 92%, at least 93%, at least 94%, at least 95%, at least 96%, at least 97%, at least 98%, at least 99%) identical to SEQ ID NO: 70.

[0190] In some embodiments of any of the compositions described herein, the HSPA1A protein comprises a sequence that is at least 75% (e.g., at least 80%, at least 85%, at least 90%, at least 91%, at least 92%, at least 93%, at least 94%, at least 95%, at least 96%, at least 97%, at least 98%, at least 99%) identical to SEQ ID NO: 94.

Mouse Mature HSPA1A Protein (NCBI Accession No. NP_034609.2)
(SEQ ID NO: 66)
MAKNTAIGIDLGTTYSCVGVFQHGKVEIIANDQGNRTTPSYVAFTDTERLIGDAAKNQVALNPQNTVFDAK
RLIGRKFGDAVVQSDMKHWPFQVVNDGDKPKVQVNYKGESRSFFPEEISSMVLTKMKEIAEAYLGHPVTNA
VITVPAYFNDSQRQATKDAGVIAGLNVLRIINEPTAAAIAYGLDRTGKGERNVLIFDLGGGTFDVSILTID
DGIFEVKATAGDTHLGGEDFDNRLVSHFVEEFKRKHKKDISQNKRAVRRLRTACERAKRTLSSSTQASLEI
DSLFEGIDFYTSITRARFEELCSDLFRGTLEPVEKALRDAKMDKAQIHDLVLVGGSTRIPKVQKLLQDFFN
GRDLNKSINPDEAVAYGAAVQAAILMGDKSENVQDLLLLDVAPLSLGLETAGGVMTALIKRNSTIPTKQTQ
TFTTYSDNQPGVLIQVYEGERAMTRDNNLLGRFELSGIPPAPRGVPQIEVTFDIDANGILNVTATDKSTGK
ANKITITNDKGRLSKEEIERMVQEAERYKAEDEVQRDRVAAKNALESYAFNMKSAVEDEGLKGKLSEADKK
KVLDKCQEVISWLDSNTLADKEEFVHKREELERVCSPIISGLYQGAGAPGAGGFGAQAPKGASGSGPTIEE
VD
Mouse Mature HSPA1A cDNA
(SEQ ID NO: 67)
atggccaag aacacggcga tcggcatcga cctgggcacc acctactcgt gcgtgggcgt
gttccagcac ggcaaggtgg agatcatcgc caacgaccag ggcaaccgca cgacccccag
ctacgtggcc ttcaccgaca ccgagcgcct catcggagac gccgccaaga accaggtggc
gctgaacccg cagaacaccg tgttcgacgc gaagcggctg atcggccgca agttcggcga
tgcggtggtg cagtccgaca tgaagcactg gccottccag gtggtgaacg acggcgacaa
goccaaggtg caggtgaact acaagggcga gagccggtog ttottccogg aggagatctc
gtccatggtg ctgacgaaga tgaaggagat cgctgaggcg tacctgggcc acccggtgac
caacgcggtg atcacggtgc ccgcctactt caacgactct cagojgcagg ccaccaagga
cgcgggcgtg atcgccggtc taaacgtgct gcggatcatc aacgagccca cggcggccgc
catcgcctac gggctggacc ggaccggcaa gggcgagcgc aacgtgctca tcttcgacct
ggggggcggc acgttcgacg tgtccatcct gacgatcgac gacggcatct tcgaggtgaa
ggccacggcg ggcgacacgc acctgggagg ggaggacttc gacaaccggc tggtgagcca
cttcgtggag gagttcaaga ggaagcacaa gaaggacatc agccagaaca agcgcgcggt
gojgcggctg cgcactgcgt gtgagagggc caagaggacg ctgtcgtcca gcacccaggc
cagcctggag atcgactctc tgttcgaggg catcgacttc tacacatcca tcacgcgggc
gog-gttcga gagctgtgct cagacctgtt ccgcggcacg ctggagcccg tggagaaggc
cctgcgcgac gccaagatgg acaaggcgca gatccacgac ctggtgctgg tgggcggctc
gacgcgcatc cccaaggtgc agaagctgct gcaggacttc ttcaacgggc gcgacctgaa
caagagcatc aaccoggacg aggcggtggc ctacggggcg goggtgcagg cggccatcct
gatgggggac aagtojgaga acgtgcagga cctgctgctg ctggacgtgg cgccgctgtc
gctgggcctg gagactgcgg gojgcgtgat gacggcgctc atcaagcgca actccaccat
ccccaccaag cagacgcaga ccttcaccac ctactcggac aaccagcccg gggtgctgat
ccaggtgtac gagggcgaga gggccatgac gcgcgacaac aacctgctgg ggcgcttcga
actgagojgc atcccgccgg cgcccagggg cgtgccacag atcgaggtga ccttcgacat
cgacgccaac ggcatcctga acgtcacggc caccgacaag agcaccggca aggccaacaa
gatcaccatc accaacgaca agggccgcct gagcaaggag gagatcgagc gcatggtgca
ggaggccgag cgctacaagg ccgaggacga ggtgcagcgc gacagggtgg ccgccaagaa
cgcgctcgaa tcctatgcct tcaacatgaa gagcgccgtg gaggacgagg gtctcaaggg
caagctcagc gaggctgaca agaagaaggt gctggacaag tgccaggagg tcatctcctg
gctggactcc aacacgctgg ccgacaagga ggagttcgtg cacaagojgg aggagctgga
gojggtgtgc agccccatca tcagtgggct gtaccagggt gojggtgctc ctggggctgg
gggcttoggg gcccaggcgc ccaagggagc ctctggctca ggacccacca tcgaggaggt
ggattaga
Rhesus Monkey Mature HSPA1A Protein (NCBI Accession No. XP_014991489.2)
(SEQ ID NO: 68)
MAKAAAIGIDLGTTYSCVGVFQHGKVEIIANDQGNRTTPSYVAFTDTERLIGDAAKNQVALNPQNTVFDAK
RLIGRKFGDPVVQSDMKHWPFQVINDGDKPKVQVSYKGETKAFYPEEISSMVLTKMKEIAEAYLGYPVTNA
VITVPAYFNDSQRQATKDAGVIAGLNVLRIINEPTAAAIAYGLDRTGKGERNVLIFDLGGGTEDVSILTID
DGIFEVKATAGDTHLGGEDFDNRLVNHFVEEFKRKHKKDISQNKRAVRRLRTACERAKRTLSSSTQASLEI
DSLFEGIDFYTSITRARFEELCSDLFRSTLEPVEKALRDAKLDKAQIHDLVLVGGSTRIPKVQKLLQDFFN
GRDLNKSINPDEAVAYGAAVQAAILMGDKSENVQDLLLLDVAPLSLGLETAGGVMTALIKRNSTIPTKQTQ
IFTTYSDNQPGVLIQVYEGERAMTKDNNLLGRFELSGIPPAPRGVPQIEVTFDIDANGILNVTATDKSTGK
ANKITITNDKGRLSKEEIERMVQEAEKYKAEDEVQRERVSAKNALESYAFNMKSAVEDEGLKGKISEADKK
KVLDKCQEVISWLDANTLAEKDEFEHKRKELEQVCNPIISGLYQGAGGPGPGGFGAQGPKGGSGSGPTIEE
VD
Rat Mature HSPA1A Protein (NCBI Accession No. NP_114177.2)
(SEQ ID NO: 69)
MAKKTAIGIDLGTTYSCVGVFQHGKVEIIANDQGNRTTPSYVAFTDTERLIGDAAKNQVALNPQNTVFDAK
RLIGRKFGDPVVQSDMKHWPFQVVNDGDKPKVQVNYKGENRSFYPEEISSMVLTKMKEIAEAYLGHPVTNA
VITVPAYFNDSQRQATKDAGVIAGLNVLRIINEPTAAAIAYGLDRTGKGERNVLIFDLGGGTFDVSILTID
DGIFEVKATAGDTHLGGEDFDNRLVSHFVEEFKRKHKKDISQNKRAVRRLRTACERAKRTLSSSTQASLEI
DSLFEGIDFYTSITRARFEELCSDLFRGTLEPVEKALRDAKLDKAQIHDLVLVGGSTRIPKVQKLLQDFFN
GRDLNKSINPDEAVAYGAAVQAAILMGDKSENVQDLLLLDVAPLSLGLETAGGVMTALIKRNSTIPTKQTQ
TFTTYSDNQPGVLIQVYEGERAMTRDNNLLGRFELSGIPPAPRGVPQIEVTFDIDANGILNVTATDKSTGK
ANKITITNDKGRLSKEEIERMVQEAERYKAEDEVQRERVAAKNALESYAFNMKSAVEDEGLKGKISEADKK
KVLDKCQEVISWLDSNTLAEKEEFVHKREELERVCNPIISGLYQGAGAPGAGGFGAQAPKGGSGSGPTIEE
VD
Cattle HSPA1A Protein (NCBI Accession No. NP_976067.3)
(SEQ ID NO: 70)
MAKNMAIGIDLGTTYSCVGVFQHGKVEIIANDQGNRTTPSYVAFTDTERLIGDAAKNQVALNPQNTVFDAK
RLIGRKFGDPVVQSDMKHWPFRVINDGDKPKVQVSYKGETKAFYPEEISSMVLTKMKEIAEAYLGHPVTNA
VITVPAYFNDSQRQATKDAGVIAGLNVLRIINEPTAAAIAYGLDRTGKGERNVLIFDLGGGTFDVSILTID
DGIFEVKATAGDTHLGGEDFDNRLVNHFVEEFKRKHKKDISQNKRAVRRLRTACERAKRTLSSSTQASLEI
DSLFEGIDFYTSITRARFEELCSDLFRSTLEPVEKALRDAKLDKAQIHDLVLVGGSTRIPKVQKLLQDFFN
GRDLNKSINPDEAVAYGAAVQAAILMGDKSENVQDLLLLDVAPLSLGLETAGGVMTALIKRNSTIPTKQTQ
IFTTYSDNQPGVLIQVYEGERAMTRDNNLLGRFELSGIPPAPRGVPQIEVTFDIDANGILNVTATDKSTGK
ANKITITNDKGRLSKEEIERMVQEAEKYKAEDEVQRERVSAKNALESYAFNMKSAVEDEGLKGKISEADKK
KVLDKCQEVISWLDANTLAEKDEFEHKRKELEQVCNPIISRLYQGAGGPGAGGFGAQGPKGGSGSGPTIEE
VD
Human Mature HSPA1A Protein
(SEQ ID NO: 93)
AKAAAIGIDLGTTYSCVGVFQHGKVEIIANDQGNRTTPSYVAFTDTERLIGDAAKNQVALNPQNTVFDAKR
LIGRKFGDPVVQSDMKHWPFQVINDGDKPKVQVSYKGETKAFYPEEISSMVLTKMKEIAEAYLGYPVTNAV
ITVPAYFNDSQRQATKDAGVIAGLNVLRIINEPTAAAIAYGLDRTGKGERNVLIFDLGGGTFDVSILTIDD
GIFEVKATAGDTHLGGEDFDNRLVNHFVEEFKRKHKKDISQNKRAVRRLRTACERAKRTLSSSTQASLEID
SLFEGIDFYTSITRARFEELCSDLFRSTLEPVEKALRDAKLDKAQIHDLVLVGGSTRIPKVQKLLQDFFNG
RDLNKSINPDEAVAYGAAVQAAILMGDKSENVQDLLLLDVAPLSLGLETAGGVMTALIKRNSTIPTKQTQI
FTTYSDNQPGVLIQVYEGERAMTKDNNLLGRFELSGIPPAPRGVPQIEVTFDIDANGILNVTATDKSTGKA
NKITITNDKGRLSKEEIERMVQEAEKYKAEDEVQRERVSAKNALESYAFNMKSAVEDEGLKGKISEADKKK
VLDKCQEVISWLDANTLAEKDEFEHKRKELEQVCNPIISGLYQGAGGPGPGGFGAQGPKGGSGSGPTIEEV
D

[0191] A non-limiting example of a human wildtype NDP genomic DNA sequence is SEQ ID NO:71.

| Human HSPA1A Gene Sequence(NCBI Reference Sequence NC_000006.12) | | |
|---|---|---|
| (SEQ ID NO: 71) | | |
| 1 | aacggctagc ctgaggagct gctgcgacag tccactacct ttttcgagag tgactcccgt | 61 |
| | tgtcccaagg cttcccagag cgaacctgtg cggctgcagg caccggcgcg tcgagtttcc | 121 |
| | ggcgtccgga aggaccgagc tcttctcgcg gatccagtgt tccgtttcca gcccccaatc | 181 |
| | tcagagcgga gccgacagag agcagggaac cggcatggcc aaagccgcgg cgatcggcat | 241 |
| | cgacctgggc accacctact cctgcgtggg ggtgttccaa cacggcaagg tggagatcat | 301 |
| | cgccaacgac cagggcaacc gcaccacccc cagctacgtg gccttcacgg acaccgagcg | 361 |
| | gctcatcggg gatgcggcca agaaccaggt ggcgctgaac ccgcagaaca ccgtgtttga | 421 |
| | cgcgaagcgg ctgattggcc gcaagttcgg cgacccggtg gtgcagtcgg acatgaagca | 481 |
| | ctggcctttc caggtgatca acgacggaga caagcccaag gtgcaggtga gctacaaggg | 541 |
| | ggagaccaag gcattctacc ccgaggagat ctcgtccatg gtgctgacca agatgaagga | 601 |
| | gatcgccgag gcgtacctgg gctaccoggt gaccaacgcg gtgatcaccg tgccggccta | 661 |
| | cttcaacgac tcgcagcgcc aggccaccaa ggatgcgggt gtgatcgcgg ggctcaacgt | 721 |
| | gctgcggatc atcaacgagc ccacggccgc cgccatcgcc tacggcctgg acagaacggg | 781 |
| | caagggggag cgcaacgtgc tcatctttga cctgggcggg ggcaccttcg acgtgtccat | 841 |
| | cctgacgatc gacgacggca tcttcgaggt gaaggccacg gccggggaca cccacctggg | 901 |
| | tggggaggac tttgacaaca ggctggtgaa ccacttcgtg gaggagttca agagaaaaca | 961 |
| | caagaaggac atcagccaga acaagcgagc cgtgaggcgg ctgcgcaccg cctgcgagag | 1021 |
| | ggccaagagg accctgtcgt ccagcaccca ggccagcctg gagatcgact ccctgtttga | 1081 |
| | gggcatcgac ttctacacgt ccatcaccag ggcgaggttc gaggagctgt gctccgacct | 1141 |
| | gttccgaagc accctggagc ccgtggagaa ggctctgcgc gacgccaagc tggacaaggc | 1201 |
| | ccagattcac gacctggtcc tggtoggggg ctccacccgc atccccaagg tgcagaagct | 1261 |
| | gctgcaggac ttcttcaacg ggcgcgacct gaacaagagc atcaaccccg acgaggctgt | 1321 |
| | ggcctacggg gojgcggtgc aggcggccat cctgatgggg gacaagtccg agaacgtgca | 1381 |
| | ggacctgctg ctgctggacg tggctcccct gtcgcbgggg ctggagacgg ccggaggcgt | 1441 |
| | gatgactgcc ctgatcaagc gcaactccac catccccacc aagcagacgc agatcttcac | 1501 |
| | cacctactcc gacaaccaac ccggggtgct gatccaggtg tacgagggcg agagggccat | 1561 |
| | gacgaaagac aacaatctgt tggggcgctt cgagctgagc ggcatccctc cggcccccag | 1621 |
| | gggcgtgccc cagatcgagg tgaccttcga catcgatgcc aacggcatcc tgaacgtcac | 1681 |
| | ggccacggac aagagcaccg gcaaggccaa caagatcacc atcaccaacg acaagggccg | 1741 |
| | cctgagcaag gaggagatcg agcgcatggt gcaggaggcg gagaagtaca aagcggagga | 1801 |
| | cgaggtgcag cgcgagaggg tgtcagccaa gaacgccctg gagtcctacg ccttcaacat | 1861 |
| | gaagagcgcc gtggaggatg aggggctcaa gggcaagatc agcgaggcgg acaagaagaa | 1921 |
| | ggtgctggac aagtgtcaag aggtcatctc gtggctggac gccaacacct tggccgagaa | 1981 |
| | ggacgagttt gagcacaaga ggaaggagct ggagcaggtg tgtaacccca tcatcagcgg | 2041 |
| | actgtaccag ggtgccggtg gtcccgggcc tgggggcttc ggggctcagg gtcccaaggg | 2101 |
| | agggtctggg tcaggcccca ccattgagga ggtagattag gggcctttcc aagattgctg | 2161 |
| | tttttgtttt ggagcttcaa gactttgcat ttcctagtat ttctgtttgt cagttctcaa | 2221 |
| | tttcctgtgt ttgcaatgtt gaaatttttt ggtgaagtac tgaacttgct ttttttccgg | 2281 |
| | tttctacatg cagagatgaa tttatactgc catcttacga ctatttcttc tttttaatac | 2341 |
| | acttaactca ggccattttt taagttggtt acttcaaagt aaataaactt taaaattcaa | |

Human HSPA1A Gene Sequence
(SEQ ID NO: 94)
atgtaccggatgcagctgctgagctgtatcgccctgtctctggccctggtcaccaattctgccaaagccgc
ggcgatcggcatcgacctgggcaccacctactcctgcgtgggggtgttccaacacggcaaggtggagatca
tcgccaacgaccagggcaaccgcaccacccccagctacgtggccttcacggacaccgagcggctcatcggg
gatgcggccaagaaccaggtggcgctgaacccgcagaacaccgtgtttgacgcgaagcggctgatcggccg
caagttcggcgacccggtggtgcagtcggacatgaagcactggcctttccaggtgatcaacgacggagaca
agcccaaggtgcaggtgagctacaagggggagaccaaggcattctaccccgaggagatctcgtccatggtg
ctgaccaagatgaaggagatcgccgaggcgtacctgggctacccggtgaccaacgcggtgatcaccgtgcc
ggcctacttcaacgactcgcagcgccaggccaccaaggatgcgggtgtgatcgcggggctcaacgtgctgc
ggatcatcaacgagcccacggccgccgccatcgcctacggcctggacagaacgggcaagggggagcgcaac
gtgctcatctttgacctgggcgggggcaccttcgacgtgtccatcctgacgatcgacgacggcatcttcga
ggtgaaggccacggccggggacacccacctgggtggggaggactttgacaacaggctggtgaaccacttcg
tggaggagttcaagagaaaacacaagaaggacatcagccagaacaagcgagccgtgaggcggctgcgcacc
gcctgcgagagggccaagaggaccctgtcgtccagcacccaggccagcctggagatcgactccctgtttga
gggcatcgacttctacacgtccatcaccagggcgaggttcgaggagctgtgctccgacctgttccgaagca
ccctggagcccgtggagaaggctctgcgcgacgccaagctggacaaggcccagattcacgacctggtcctg
gtcgggggctccacccgcatccccaaggtgcagaagctgctgcaggacttcttcaacgggcgcgacctgaa
caagagcatcaaccccgacgaggctgtggcctacggggcggcggtgcaggcggccatcctgatgggggaca
agtccgagaacgtgcaggacctgctgctgctggacgtggctcccctgtcgctggggctggagacggccgga
ggcgtgatgactgccctgatcaagcgcaactccaccatccccaccaagcagacgcagatcttcaccaccta
ctccgacaaccaacccggggtgctgatccaggtgtacgagggcgagagggccatgacgaaagacaacaatc
tgttggggcgcttcgagctgagcggcatccctccggcccccaggggcgtgccccagatcgaggtgaccttc
gacatcgatgccaacggcatcctgaacgtcacggccacggacaagagcaccggcaaggccaacaagatcac
catcaccaacgacaagggccgcctgagcaaggaggagatcgagcgcatggtgcaggaggcggagaagtaca
aagcggaggacgaggtgcagcgcgagagggtgtcagccaagaacgccctggagtcctacgccttcaacatg
aagagcgccgtggaggatgaggggctcaagggcaagatcagcgaggcggacaagaagaaggttctggacaa
gtgtcaagaggtcatctcgtggctggacgccaacaccttggccgagaaggacgagtttgagcacaagagga
aggagctggagcaggtgtgtaaccccatcatcagcggactgtaccagggtgccggtggtcccgggcctggg
ggcttcggggctcagggtcccaagggagggtctgggtcaggccccaccattgaggaggtggattaa

### Vascular Endothelial Growth Factor (VEGF)

[0192] The VEGF gene encodes vascular endothelial growth factor (VEGF), formerly known as fins-like tyrosine kinase (Flt-1). The VEGF protein is a heparin-biding protein that induces migration and proliferation of vascular endothelial cells.

[0193] The human VEGF gene is located on chromosome 6p21. It contains 8 exons encompassing ˜16 kilobases (kb) (NCBI Accession No. NG_008732.1). The full-length wildtype VEGF protein expressed from the human VEGF gene is 412 amino acids in length.

[0194] An exemplary human wildtype VEGF protein is or includes the sequence of SEQ ID NO: 72, SEQ ID NO: 74, SEQ ID NO: 76, SEQ ID NO: 77, SEQ ID NO: 78, or SEQ ID NO: 79. Non-limiting examples of nucleic acid encoding a wildtype VEGF protein are or include SEQ ID NO: 73 and SEQ ID NO: 75.

[0195] Non-limiting examples of protein and nucleotide sequences encoding a wildtype VEGF protein are shown below.

Human VEGF Transcript Variant 1 Protein Sequence
(SEQ ID NO: 72)
MTDRQTDTAPSPSYHLLPGRRRTVDAAASRGQGPEPAPGGGVEGVGARGVALKLFVQLLGCSRFGGAVVRA
GEAEPSGAARSASSGREEPQPEEGEEEEEKEEERGPQWRLGARKPGSWTGEAAVCADSAPAARAPQALARA
SGRGGRVARRGAEESGPPHSPSRRGSASRAGPGRASETMNFLLSWVHWSLALLLYLHHAKWSQAAPMAEGG
GQNHHEVVKFMDVYQRSYCHPIETLVDIFQEYPDEIEYIFKPSCVPLMRCGGCCNDEGLECVPTEESNITM
QIMRIKPHQGQHIGEMSFLQHNKCECRPKKDRARQEKKSVRGKGKGQKRKRKKSRYKSWSVYVGARCCLMP
WSLPGPHPCGPCSERRKHLFVQDPQTCKCSCKNTDSRCKARQLELNERTCRCDKPRR
Human VEGF Transcript Variant 1 cDNA
(SEQ ID NO: 73)
ctgacqqacagacagacagacaccgccoccagocccagctaccacctcctcccoggccggcggcggacagt
ggacgcggcggcgagccgogggcaggggccggagoccgcgccoggaggcggggtggagggggtcggggctc
goggcgtcgcactgaaacttttcgtccaacttctgggctgttctcgcttoggaggagccgtggtccgcgcg
ggggaagccgagccgagoggagccgcgagaagtqctagctogggccgggaggagccgcagccggaggaggg
ggaggaggaagaagagaaggaagaggagagggggccgcagtggcgactoggcgctoggaagccgggctcat
ggacgggtgaggcggcggtgtgcgcagacagtgctccagccgcgcgcgctccccaggccctggcccgggcc
tcgggccggggaggaagagtagctcgccgaggcgccgaggagagcgggccgccccacagcccgagccggag
agggagcgcgagccgcgccggccccggtcgggcctccgaaaccatgaactttctgctgtcttgggtgcatt
ggagccttgccttgctgctctacctccaccatgccaagtggtcccaggctgcacccatggcagaaggagga
gggcagaatcatcacgaagtggtgaagttcatggatgtctatcagcgcagctactgccatccaatcgagac
cctggtggacatcttccaggagtaccctgatgagatcgagtacatcttcaagccatcctgtgtgcccctga
tgcgatgcgggggctgctgcaatgacgagggcctggagtgtgtgcccactgaggagtccaacatcaccatg
cagattatgcggatcaaacctcaccaaggccagcacataggagagatgagcttcctacagcacaacaaatg
tgaatgcagaccaaagaaagatagagcaagacaagaaaaaaaatcagttcgaggaaagggaaaggggcaaa
aacgaaagcgcaagaaatcccggtataagtcctggagcgtgtacgttggtgcccgctgctgtctaatgccc
tggagcctccctggcccccatccctgtgggccttgctcagagcggagaaagcatttgtttgtacaagatcc
gcagacgtgtaaatgttcctgcaaaaacacagactcgcgttgcaaggcgaggcagcttgagttaaacgaac
gtacttgcagatgtgacaagccgaggcggtga
Human VEGF Transcript Variant 3 Protein Sequence
(SEQ ID NO: 74)
MTDRQTDTAPSPSYHLLPGRRRTVDAAASRGQGPEPAPGGGVEGVGARGVALKLFVQLLGCSRFGGAVVRA
GEAEPSGAARSASSGREEPQPEEGEEEEEKEEERGPQWRLGARKPGSWTGEAAVCADSAPAARAPQALARA
SGRGGRVARRGAEESGPPHSPSRRGSASRAGPGRASETMNFLLSWVHWSLALLLYLHHAKWSQAAPMAEGG
GQNHHEVVKFMDVYQRSYCHPIETLVDIFQEYPDEIEYIFKPSCVPLMRCGGCCNDEGLECVPTEESNITM
QIMRIKPHQGQHIGEMSFLQHNKCECRPKKDRARQEKKSVRGKGKGQKRKRKKSRPCGPCSERRKHLFVQD
PQTCKCSCKNTDSRCKARQLELNERTCRCDKPRR
Human VEGF Transcript Variant 3 cDNA
(SEQ ID NO: 75)
ctgacggacagacagacagacaccgccoccagccccagctaccacctcctcccoggccggcggcggacagt
ggacgcggcggcgagccgcgggcaggggccggagcccgcgccoggaggcggggtggagggggtcggggctc
goggcgtcgcactgaaacttttcgtccaacttctgggctgttctcgcttcggaggagccgtggtccgcgcg
ggggaagccgagccgagoggagccgcgagaagtgctagctogggccgggaggagccgcagccggaggaggg
ggaggaggaagaagagaaggaagaggagagggggccgcagtggcgactoggcgctoggaagccgggctcat
ggacgggtgaggcggcggtgtgcgcagacagtgctccagccgcgcgcgctccccaggccctggcccgggcc
togggccggggaggaagagtagctcgccgaggcgccgaggagagogggccgccccacagcccgagccggag
agggagcgcgagccgcgccggcccoggtogggcctccgaaaccatgaactttctgctgtcttgggtgcatt
ggagccttgccttgctgctctacctccaccatgccaagtggtoccaggctgcacccatggcagaaggagga
gggcagaatcatcacgaagtggtgaagttcatggatgtctatcagcgcagctactgccatccaatcgagac
cctggtggacatcttccaggagtaccctgatgagatcgagtacatcttcaagccatcctgtgtgcccctga
tgcgatgogggggctgctgcaatgacgagggcctggagtgtgtgcccactgaggagtccaacatcaccatg
cagattatgoggatcaaacctcaccaaggccagcacataggagagatgagottcctacagcacaacaaatg
tgaatgcagaccaaagaaagatagagcaagacaagaaaaaaaatcagttcgaggaaagggaaaggggcaaa
aacgaaagcgcaagaaatcccgtocctgtgggccttgctcagagoggagaaagcatttgtttgtacaagat
ccgcagacgtgtaaatgttcctgcaaaaacacagactcgcgttgcaaggcgaggcagcttgagttaa
acgaacgtacttgcagatgtgacaagccgaggcggtga
Mature Human VEGF-A
(SEQ ID NO: 76)
APMAEGGGQNHHEVVKFMDVYQRSYCHPIETLVDIFQEYPDEIEYIFKPSCVPLMRCGGCCNDEGLECVPT
EESNITMQIMRIKPHQGQHIGEMSFLQHNKCECRPKKDRARQEKKSVRGKGKGQKRKRKKSRYKSWSVYVG
ARCCLMPWSLPGPHPCGPCSERRKHLFVQDPQTCKCSCKNTDSRCKARQLELNERTCRCDKPRR
Mature Human VEGF-B
(SEQ ID NO: 77)
PVSQPDAPGHQRKVVSWIDVYTRATCQPREVVVPLTVELMGTVAKQLVPSCVTVQRCGGCCPDDGLECVPT
GQHQVRMQILMIRYPSSQLGEMSLEEHSQCECRPKKKDSAVKPDRAATPHHRPQPRSVPGWDSAPGAPSPA
DITHPTPAPGPSAHAAPSTTSALTPGPAAAAADAAASSVAKGGA
Mature Human VEGF-C
(SEQ ID NO: 78)
AHYNTEILKSIDNEWRKTQCMPREVCIDVGKEFGVATNTFFKPPCVSVYRCGGCCNSEGLQCMNTSTSYLS
KTLFEITVPLSQGPKPVTISFANHTSCRCMSKLDVYRQVHSIIRR
Mature Human VEGF-D
(SEQ ID NO: 79)
FAATFYDIETLKVIDEEWQRTQCSPRETCVEVASELGKSTNTFFKPPCVNVFRCGGCCNEESLICMNTSTS
YISKQLFEISVPLTSVPELVPVKVANHTGCKCLPTAPRHPYSIIRR

[0196] In some embodiments of any of the compositions described herein, the VEGF protein comprises a sequence that is at least 75% (e.g., at least 80%, at least 85%, at least 90%, at least 91%, at least 92%, at least 93%, at least 94%, at least 95%, at least 96%, at least 97%, at least 98%, at least 99%) identical to SEQ ID NO: 72.

[0197] In some embodiments of any of the compositions described herein, the VEGF protein comprises a sequence that is at least 75% (e.g., at least 80%, at least 85%, at least 90%, at least 91%, at least 92%, at least 93%, at least 94%, at least 95%, at least 96%, at least 97%, at least 98%, at least 99%) identical to SEQ ID NO: 74.

[0198] In some embodiments of any of the compositions described herein, the VEGF protein comprises a sequence that is at least 75% (e.g., at least 80%, at least 85%, at least 90%, at least 91%, at least 92%, at least 93%, at least 94%, at least 95%, at least 96%, at least 97%, at least 98%, at least 99%) identical to SEQ ID NO: 76.

[0199] In some embodiments of any of the compositions described herein, the VEGF protein comprises a sequence that is at least 75% (e.g., at least 80%, at least 85%, at least 90%, at least 91%, at least 92%, at least 93%, at least 94%, at least 95%, at least 96%, at least 97%, at least 98%, at least 99%) identical to SEQ ID NO: 77.

[0200] In some embodiments of any of the compositions described herein, the VEGF protein comprises a sequence that is at least 75% (e.g., at least 80%, at least 85%, at least 90%, at least 91%, at least 92%, at least 93%, at least 94%, at least 95%, at least 96%, at least 97%, at least 98%, at least 99%) identical to SEQ ID NO: 78.

[0201] In some embodiments of any of the compositions described herein, the VEGF protein comprises a sequence that is at least 75% (e.g., at least 80%, at least 85%, at least 90%, at least 91%, at least 92%, at least 93%, at least 94%, at least 95%, at least 96%, at least 97%, at least 98%, at least 99%) identical to SEQ ID NO: 79.

[0202] A non-limiting example of a human wildtype VEGF genomic DNA sequence is SEQ ID NO: 80. The exons in SEQ ID NO: 80 are: nucleotide positions 1-1104 (exon 1); nucleotide positions 4133-4184 (exon 2) and nucleotide positions 7261-7457 (exon 3); nucleotide positions 8252-8328 (exon 4); nucleotide positions 8681-8710 (exon 5); nucleotide positions 10524-10646 (exon 6); nucleotide positions 11748-11879 (exon 7); and nucleotide positions 14333-16279 (exon 8). The introns in SEQ ID NO: 80 are: nucleotide positions 1105-4132 (intron 1); nucleotide positions 4185-7260 (intron 2); nucleotide positions 7458-8251 (intron 3); nucleotide positions 8329-8680 (intron 4); nucleotide positions 8711-10523 (intron 5); nucleotide positions 10647-11747 (intron 6); and nucleotide positions 11880-14332 (intron 7).

| Human VEGF-A Gene (NCBI Accession No.NG_008732.1) | |
|---|---|
| (SEQ ID NO: 80) | |
| 1 | cgcctgtaat cccagcactc tgggaggcag aggtgggccg atcacttgag gtcaggagtt |
| 61 | cgagaccagc ctgggcaaca tggtgaaaca ccatctctac taaaaacaca aaaattagcc |
| 121 | aggtgtggtg gcaggcacct gcagtcccag ctactccgga ggctgaggca ggagaattgc |
| 181 | tcgaacctgg gaggcagggg ttgcagtgag ccgacatggc gccactgcac tccagtctgg |
| 241 | gcgacagagt gagaccctat ctcaaaaaaa aaaaaaaaaa aaaaagaccc aactcaagta |
| 301 | tcatctccag gaagccttcc cctactccca gcaattaaat gctcctcaga gaattcccat |
| 361 | ttttggttta ctotttggtt tacctccaga caggaagocc ccactgacac tgttgtagtc |
| 421 | ccagggtgca acacaaagca gagatcacaa gctgagttta ataattgctt gtggaataca |
| 481 | tgtcccaagc cacctcctgc aggaagccct tccagatgcc cattctagcc agtctggctc |
| 541 | tttgcttcca taccttcaca acacttgtgc ctcccccagg gcctctttct catcttgctt |
| 601 | tctggggcag ctgtgtgcac atttgtctgt gtgcagcaac tctctaaggc agggattttt |
| 661 | actcctattt ttgatgaggg gagctgtggc tcagagaggt tgaataacct aaggccacac |
| 721 | agtgagtggc agagccagga atgtgacttg ggtccatttg aatccaaagt ccctgtactt |
| 781 | tccactgccc tacctagatg tccctgtacc tcctataaaa tcagcatgga gcctggtgcc |
| 841 | tggtagtccc tacaaatatt cacaaattgg agcttagctc agctctcagg caaggcccag |
| 901 | gtcaaaaggg cagatacagc tttgggacct tagttgccac cacatgccat accttcttcc |
| 961 | cagcagaagg actccctcca agacagggta ggggtggagg atgtgaacag gggcagaaat |
| 1021 | gggcatgttt tggggtcaga cttggaggaa tagcagagat tggagtgtca gaaggtgagc |
| 1081 | atgcctgggg gtgttgggga gatgcaattc atcagggaca gcttagtgtc aggggattag |
| 1141 | actggggccc atgaaggaga ggcagaggct gatgggccta ggggtggtgt gggtaggtga |
| 1201 | gcttccccag acagtgactc tgccctgccc tctctccagc taggtcctct tccccattcc |
| 1261 | ttcccccttt cctgactgga tcctcttggg agagttaccc tccttggctt cctctgctcc |
| 1321 | aatcttttta tcagttggcc atcattactt atcattacct caagtcaaac ctccagatcc |
| 1381 | acatggggct aggacattgg cactggacca aagaggccct ttcctttgct ttctctttgt |
| 1441 | ctttttaatg cttbittgca aagacctagg cggggagaga gagagagaga gagagacaga |
| 1501 | gattgaccca cagtcagggt cagggaattg aggggaacca acccaattct ctctccttca |
| 1561 | attcaccagg tttgtatcct gcccttcctg cagatcagtg tcctgctagt cacctggggg |
| 1621 | tcaggggatg gagtgaagga caagacctcc ttccattgca gtgaagccac ttggagaaat |
| 1681 | gtgtggaaaa cagcaagacc cagtgactct ctcctcacct tctttccaat ctcaggagag |
| 1741 | attttgtccc ttcatccacc ggcttctaga ttaaccaccc acacccacac aggcgagagt |
| 1801 | ttccctgaat attggaggtg acaggacatc aggacaaagt acaactattg tgccttggcc |
| 1861 | caatcactac tttctttgtc tggggccgcc gctggctcct ggctgccttt cgcacttttc |
| 1921 | tccaccccca cccctttctc cccttccccc tcacctggaa caccttcccc ttcctccttg |
| 1981 | gctccttctg aactgccttc agagccacag actgbjggga gtggccactg cgctcccaag |
| 2041 | gtgaggccct ccaagojggg ccgagtttgc ccctcaactg ggagccagca tgacctctgt |
| 2101 | gtgggctgct ctctgcttca ctgccccttc ccccaatctg ctaggtgacc ctgggcccct |
| 2161 | ttgtgccctc tctgggcctt cggaggattc tttggggaga cagtctgctc tgacgcccct |
| 2221 | tcccctgcag caagcagcct ggggagggag gtgaggataa gtgaagtcaa gttgttcagg |
| 2281 | gggctaagcc catggaaggg aagatgccac agagatacat gtggtcttgt gattgttgtt |
| 2341 | ttgtgctttt tccccttttt tgaaagctca ggtgactagg tgacttgagc ttttaatttg |
| 2401 | gtgacaatgt gggcactggc tgagtcctta agagtacatt gttgtaaatg ccggtgacaa |
| 2461 | cacactgggg catgggatcc agagttaacc cctccaggtc acagccaggt tatatctcca |
| 2521 | caatgaaggg gggaggtggg ccatactttc tcgccctaat gaaggtagct caaaaacccc |
| 2581 | taggccaggt tgtaatccta gccttatata aaaggaattc tgtgccctca ctcccctgga |
| 2641 | tccctgggca aagccccaga gggaaacaca aacaggttgt tgtaacacac cttgctgggt |
| 2701 | accaccatgg aggacagttg gcttatgggg gtggggggtg cctggggcca cggagtgact |
| 2761 | ggtgatggct atccctcctt ggaacccctc cagcctcctc ttagcttcag atttgtttat |
| 2821 | ttgtttttta ctaagacctg ctctttcagg tctgttggct cttttagggg ctgaagaagg |
| 2881 | ccgagttgag aagggatgca agggaggggg ccagaatgag cccttagggc tcagagcctc |
| 2941 | catcctgccc caagatgtct acagcttgtg ctcctggggt gctagaggcg cacaaggagg |
| 3001 | aaagttagtg gcttcccttc catatcccgt tcatcagcct agagcatgga gcccaggtga |
| 3061 | ggaggcctgc ctgggagggg gccctgagcc aggaaataaa catttactaa ctgtacaaag |
| 3121 | accttgtccc tgctgcbggg gagcctgcca agtggtggag acaggactag tgcacgaatg |
| 3181 | atggaaaggg agggttgggg tgggtgggag ccagcccttt tcctcataag ggccttagga |
| 3241 | caccataccg atggaactgg gggtactggg gaggtaacct agcacctcca ccaaaccaca |
| 3301 | gcaacatgtg ctgaggatgg ggctgactag gtaagctccc tggagcgttt tggttaaatt |
| 3361 | gagggaaatt gctgcattcc cattctcagt ccatgcctcc acagaggcta tgccagctgt |
| 3421 | aggccagacc ctggcaagat ctgggtggat aatcagactg actggtccca ctcttcccac |
| 3481 | aggcctcaga gccccaactt tgttccctgg ggcagcctgg aaatagccag gtcagaaacc |
| 3541 | agctaggaat ttttccaagc tgcttcctat atgcaagaat gggatggggc ctttgggagc |
| 3601 | acttagggaa gatgtggaga gttggaggaa aagggggctt ggaggtaagg gaggggactg |
| 3661 | ggggaaggat aggggagaag ctgtgagcct ggagaagtag ccaagggatc ctgagggaat |
| 3721 | gggggagctg agacgaaacc cccatttcta ttcagaagat gagctatgag tctgggcttg |
| 3781 | ggctgataga agccttggcc cctggcctgg tgggagctct gggcagctgg cctacagacg |
| 3841 | ttccttagtg ctggcgggta ggtttgaatc atcacgcagg ccctggcctc cacccgcccc |
| 3901 | caccagcccc ctggcctcag ttccctggca acatctgggg ttgggggggc agcaggaaca |
| 3961 | agggcctctg tctgcccagc tgcctccccc tttgggtttt gccagactcc acagtgcata |
| 4021 | cgtgggctcc aacaggtcct cttccctccc agtcactgac taaccccgga accacacagc |
| 4081 | ttcccgttct cagctccaca aacttggtgc caaattcttc tcccctggga agcatccctg |
| 4141 | gacacttccc aaaggacccc agtcactcca gcctgttggc tgccgctcac tttgatgtct |
| 4201 | gcaggccaga tgagggctcc agatggcaca ttgtcagagg gacacactgt ggcccctgtg |
| 4261 | cccagccctg ggctctctgt acatgaagca actccagtcc caaatatgta gctgtttggg |
| 4321 | aggtcagaaa tagggggtcc aggagcaaac tccccccacc ccctttccaa agcccattcc |
| 4381 | ctctttagcc agagccgggg tgtgcagacg gcagtcacta gggggcgctc ggccaccaca |
| 4441 | gggaagctgg gtgaatggag cgagcagcgt cttcgagagt gaggacgtgt gtgtctgtgt |
| 4501 | gggtgagtga gtgtgtgcgt gtggggttga gggcgttgga gcjgggagaa ggccaggggt |
| 4561 | cactccagga ttccaataga tctgtgtgtc cctctcccca cccgtccctg tccggctctc |
| 4621 | cgccttcccc tgcccccttc aatattccta gcaaagaggg aacggctctc aggccctgtc |
| 4681 | cgcacgtaac ctcactttcc tgctccctcc tcgccaatgc cccgcgggcg cgtgtctctg |
| 4741 | gacagagttt cogggggcgg atgggtaatt ttcaggctgt gaaccttggt gggggtcgag |
| 4801 | cttccccttc attgojgcgg gctgcgggcc aggcttcact gagcgtccgc agagcccggg |
| 4861 | cccgagccgc gtgtggaagg gctgaggctc gcctgtcccc gccccccggg gcgggccggg |
| 4921 | ggcggggtcc cggcggggcg gagccatgcg cccccccctt ttttttttaa aagtcggctg |
| 4981 | gtagojggga ggatcgcgga ggcttggggc agccgggtag ctcggaggtc gtggcgctgg |
| 5041 | gggctagcac cagcgctctg tcgggaggcg cagcggttag gtggaccggt cagcggactc |
| 5101 | accggccagg gcgctoggtg ctggaatttg atattcattg atccgggttt tatccctctt |
| 5161 | cttttttctt aaacattttt ttttaaaact gtattgtttc tcgttttaat ttatttttgc |
| 5221 | ttgccattcc ccacttgaat cgggccgacg gcttggggag attgctctac ttccccaaat |
| 5281 | cactgtggat tttggaaacc agcagaaaga ggaaagaggt agcaagagct ccagagagaa |
| 5341 | gtcgaggaag agagagacgg ggtcagagag agcgcgcggg cgtgcgagca gcgaaagcga |
| 5401 | caggggcaaa gtgagtgacc tgcttttggg ggtgaccgcc ggagcgcggc gtgagccctc |
| 5461 | ccccttggga tcccgcagct gaccagtcgc gctgacggac agacagacag acaccgcccc |
| 5521 | cagccccagc taccacctcc tcccojgccg gcggcggaca gtggacgcgg cggcgagccg |
| 5581 | cgggcagggg ccggagcccg cgcccggagg cggggtggag ggggtcgggg ctcgcggcgt |
| 5641 | cgcactgaaa cttttcgtcc aacttctggg ctgttctcgc ttcggaggag ccgtggtccg |
| 5701 | cgcgggggaa gccgagccga gcggagccgc gagaagtgct agctcgggcc gggaggagcc |
| 5761 | gcagccggag gagggggagg aggaagaaga gaaggaagag gagagggggc cgcagtggcg |
| 5821 | actojgcgct cggaagccgg gctcatggac gggtgaggcg gcggtgtgcg cagacagtgc |
| 5881 | tccagccgcg cgcgctcccc aggccctggc cojggcctcg ggccggggag gaagagtagc |
| 5941 | tcgccgaggc gccgaggaga gojggccgcc ccacagcccg agccggagag ggagcgcgag |
| 6001 | ccgcgccggc ccoggtojgg cctccgaaac catgaacttt ctgctgtctt gggtgcattg |
| 6061 | gagccttgcc ttgctgctct acctccacca tgccaaggta agoggtcgtg ccctgctggc |
| 6121 | gccgcgggcc gctgcgagcg cctctccogg ctggggacgt gcgtgcgagc gcgcgcgtgg |
| 6181 | gggctccgtg ccccacgcgg gtccatgggc accaggcgtg cggcgtcccc ctctgtcgtc |
| 6241 | ttaggtgcag ggggaggggg cgcgcgcgct aggtgggagg gtacccggag agaggctcac |
| 6301 | cgcccacgcg ggccctgccc acccaccgga gtcaccgcac gtacgatctg ggccgaccag |
| 6361 | ccgagggcgg gagccggagg aggaggccga gggggcbggg cttgcgttgc cgctgccggc |
| 6421 | tgaagtttgc tccojgccgc tggtccogga cgaactggaa gtctgagcag cgggggcggg |
| 6481 | agccagagac cagtgggcag ggggtgctcg gaccttggac cgcgggaggg cagagagcgt |
| 6541 | ggagggggca gggcgcagga gggagagggg gcttgctgtc actgccactc ggtctcttca |
| 6601 | gccctcgccg cgagtttggg aaaagttttg gggtggattg ctgoggggac cccccctccc |
| 6661 | tgctgggcca cctgcgccgc gccaaccccg ccoitccccg ctcgcgtccc gctcggtgcc |
| 6721 | cgccctcccc cgccojgccg ggtgcgcgcg gcgcggagcc gattacatca gcccgggcct |
| 6781 | ggccggccgc gtgttcccgg agcctcggct gcccgaatgg ggagcccaga gtggcgagcg |
| 6841 | gcacccctcc ccccgccagc cctccgcggg aaggtgacct ctcgaggtag ccccagcccg |
| 6901 | gggatccaga gaaccatccc taccccttcc tactgtctcc agaccctacc tctgcccagt |
| 6961 | gctaggagga atttcctgac gccccttctc ttcacccatt tcctttttag cctggagaga |
| 7021 | agcccctgtc accccgctta ttttcatttc tctctgcgga gaagatccat ctaacccctt |
| 7081 | tctggcccca gagtccaggg aaaggatgat cactgtcaga agtcgtggcg cgggagccca |
| 7141 | ctgggcgctt tgtcacattc caccgaaagt cccgacttgg tgacagtgtg cttcccttcc |
| 7201 | ctcgccaaca gttccgagtg agcbitgott tagctotcgt gggggtgggt caagggagga |
| 7261 | tttgaagagt cattgcccca ctttaccctt ttggagaaat ggcttgaaat ttgctgtgac |
| 7321 | acgggcagca tgggaatagt ccttcctgaa ccctggaaag gagctcctgc cagccttgca |
| 7381 | cacactttgt cctggtgaaa ggcagccctg gagcaggtgt ttttttggaa ctccaaacct |
| 7441 | gcccacccaa cttgcttctg aaagggactc taaagggtcc ctttccgctc ctctctgacg |
| 7501 | ccttccctca gccagaattc ccttggagag gaggcaagag gaaagccatg gacaggggtc |
| 7561 | gctgctaaca ccgcaagttc ctcagaccct ggcacaaagg ccttggctac aggcctccaa |
| 7621 | gtagggagga gggggaggag tggctgcctg gccacagtgt gaccttcaga ggcccccaga |
| 7681 | gaaggacacc tggcccctgc ctgcctagaa ccgcccctcc tgtgctccct ggccttggaa |
| 7741 | ggggtatgaa atttccgtcc cctttcctcc ttggggccca ggaggagtgg agggtcccgg |
| 7801 | gagaatattg tcagggggaa ggcagggggt gtcatgggaa tgggtgaggg ggctgaggtg |
| 7861 | cagaatccag ggggtccctg caggagccgc agtggtaagc tgtccagctg gaagcctggt |
| 7921 | aactgtbitt ttctcttgag aggggcttcc tgtgaccttg gctgtctctg ggagcagggc |
| 7981 | tggggtacct gagtggggtg catttggggt gtttgggaag gagagggaaa gaaagatgga |
| 8041 | cagtgggact ctcccctagc agggtctggt gttccgtagg ctagagtgcc cctctgctct |
| 8101 | gcgagtgctg ggcgggaggg gagttggtga gagctggaga cccccaggaa gggctggcag |
| 8161 | aagcctttcc ttttgggtgc bitcaggtcc gcatgtcttg gcttgttgac cttcacagct |
| 8221 | tctggcgagg ggaggaatga tctgatgcgg gtggggaggg ttagaggagg cctcaggcct |
| 8281 | aaggtggtgc agggggcccc ctaggggctg ggcagtgcca aggcataaaa gccttccctg |
| 8341 | gtccctggtg gcatttgaag gtgcccaggt gagaggggct tggcacctcc tcaccctggg |
| 8401 | agggagaaga aaccagggaa caggtaggag tgggagacag gtgaggcttt ggaaatctat |
| 8461 | tgaggctctg gagagatttg tgtagagagg aaaatgtggt tctcccccag ggtctcctcc |
| 8521 | tgggttttta ccctctaagc aacctgtggg catgcbjggt tattcctaag gactagaaga |
| 8581 | gcttggatgg gggagggtgg ttggtgccct toggtcctcg gcacccccct ccgtctccaa |
| 8641 | caccagctca ccctggtatt tttcatgtca gcaggagaag gtcaccatgt tgtttttctc |
| 8701 | gcccctagtc cttccttcct gccccagtcc aaatttgtcc tcctatttga ccttaatact |
| 8761 | taccatggct ttggaccagg gaactagggg gatagtgaga gcagggagag ggaagtgtgg |
| 8821 | ggaaggtaca ggggacctcg acagtgaagc attctggggt tttcctcctg catttcgagc |
| 8881 | tccccagccc ccaacatctg gttagtcttt aacttcctcg ggttcataac catagcagtc |
| 8941 | caggagtggt gggcatattc tttgcccgtg gggacccccg gttgtgtcct gttcgactca |
| 9001 | gaagacttgg agaagccaga ggctgttggt gggagggaag tgaggaggga ggaggggctg |
| 9061 | ggtggcbggg cctgtgcacc ccagcccctg cccatgccca tgccttgctc tctttctgtc |
| 9121 | ctcagtggtc ccaggctgca cccatggcag aaggaggagg gcagaatcat cacgaaggtg |
| 9181 | agtccccctg gcbgttggat ggggttccct gtcctctcag gggatgggtg gatggcctaa |
| 9241 | ttcctttttc ttcagaactg tggggaggaa ggggaagggg cacaggaata taaggatcaa |
| 9301 | gaaagaaaga gcbjggcacc acgaggttca ccctcagttt cgtgaggact ctccgctgtt |
| 9361 | caggtctctg ctagaagtag gacttgttgc ctttttcttc tgctctttcc agtaaaattt |
| 9421 | tatttggaga aggagtcgtg cgcacagagc aggaagacag tgttcaggga tcctaggtgt |
| 9481 | tgggggaagt gtcccttgtt tcccotagct cccaggggag agtggacatt tagtgtcatt |
| 9541 | tcctatatag acatgtccca tttgtgggaa ctgtgaccct tcctgtgtga gctggaggca |
| 9601 | cagagggctc agcctaatgg gatctctcct cccttccctg gtttgcattc ctttgggggt |
| 9661 | ggagaaaacc ccatttgact atgttcgggt gctgtgaact tccctcccag gccagcagag |
| 9721 | ggctggctgt agctcccagg cgccccgccc ccctgcccaa ccccgagtcc gcctgccttt |
| 9781 | bittccgttg tggtttggat cctcccattt ctctggggac accctggctc tccccaccac |
| 9841 | tgactgtggc ctgtgctctc cacctctggg gagggaaggc cctggggtct tccttcccgc |
| 9901 | gagtttccct gacctaaatc tggcgtggct gggtagtggc cagcagtggt gatgcccagc |
| 9961 | ctgttctgcc tcctccttcc ccaccccagg agccctttcc ttggcctagg acctggcttc |
| 10021 | tcagccactg accggccccc tgcttccagt gcgccactta ccccttccag cttcccagtg |
| 10081 | gtctctggtc tgggagaggc aggacaaagg tctttgtttg ctggagaaaa ggttgtctgc |
| 10141 | gataaataag gaaaaccacg aaagcctggt bittggagtg tacgtgtgtg ctcccccagg |
| 10201 | cagtggaggc cagccctcct tggaggggcg gctgcctgat gaaggatgcg ggtgaggttc |
| 10261 | cccgcctcca cctcccatgg gacttgggga ttcattccaa ggggaagctt tttgggggaa |
| 10321 | ttcctacccc aggtcttttt accctcagtt accaacccct tgcccaggcc agaccttcct |
| 10381 | gctatcccct cctgggccac aagcctggcc ctcctctgtc ccaattgtga tgaaggggca |
| 10441 | gttcaaaact tcttgattag tcatcttctc ccctatcgac ttggctttaa aaaatgacct |
| 10501 | tttcagactt ctagtctcgt tcactctttt tgatgatgct ttgccgtaac ccttcgtggg |
| 10561 | tagagaagga ttctgtgccc attggtggtc tggataaaag aaatagagac ctcacaggaa |
| 10621 | gcagtggact ggcctgtttc cccactgttc tttctgtttt cacacctgtg gccttctccc |
| 10681 | caccttcttc ccaatcaacc tattgtgtac atagcccccc tcattgtcct ttattcttct |
| 10741 | ggaaagcaga ccttggaggg aggagtgagg gggaggctca gcbgtggtct ctggggggtg |
| 10801 | ggggttggga gcbggggtgg aagtccacga agcatacact taagatgctt tggtgaagtt |
| 10861 | ctaaacttca tattacccag gctgaaaaaa gagcacttgt tcctagggct ggaaatggaa |
| 10921 | gccaaaacac cacctttttc agcctgtttc agcatcttta gagatcagcc caacccactt |
| 10981 | acacagttga gcagagttgg aggcctagag aggggaggga ctggcccaag gtcataccaa |
| 11041 | ctcatggcca gagcctgggc ctcctcactg gccaggtgtt atttcttccc tctgggtagg |
| 11101 | gaacctattt cagggacagg attgctatgt ggtagtggtg gtggggtgcg ataggcgtgg |
| 11161 | caggcbjggc cacaatttgg agtagtcatg ccagagtcct gcatttattt attctcaagg |
| 11221 | gccccgcctc tgtggcccag aattacccct tcatgctcca gtgcacccca ggcttcgtgg |
| 11281 | ccagcctggg aaactgtctc taccctggtc tcccttcaga tcagcttcta gaaatgtttc |
| 11341 | gtggctacag tggcagcact gttttttcca tgatgcaagc agtttgccct cttgggcggg |
| 11401 | gttatcagtg gctggcaggg ctggcacagc gtgtccgccc actgccacct gtgggttcca |
| 11461 | ggagggccca gcccctgtgc tgatgcccac caccttctca gctcatgtct ggggaagagg |
| 11521 | actggcaggg ggaaaggtgc ctcctcctga aaggtgcctc ctctgttttt gcctaatata |
| 11581 | ggcttgggaa cactttgatg tcagctaatt ctgactcctt tacttactag ctgtgcggcc |
| 11641 | ttggggcaac ttacttagcc tctttgagcc tcctgttccc catctgtaaa atggaatctc |
| 11701 | aatagtgtct aatagtacca tgtggagaaa cttgtgtgaa atgatagctg tggactactg |
| 11761 | tacacagtac tcaggatgta gtaagtgctc aataaacagc bittggtatg gttgacgtta |
| 11821 | tggtagtggt tgtggggagg acgtaggaaa ctggagacta gcttggcaaa gctggctctt |
| 11881 | cctcctttta gggaaagctt agagcatccc catggggtat acccatactc agactgtcct |
| 11941 | ctggcatcga ggttggccca ggattcagtt cagcbgtcac agtgaggtgg cgggatcaga |
| 12001 | tgtggcaggc catgtccctt ggaacttgag tacatcgtgt gatctctgga atgaaaacag |
| 12061 | gccttcacca gtgttgatgg tggaaagctt agggaagtgc ttcaaacaca gtaggaggga |
| 12121 | cttacgttag attttggaag gacttgcctg attcggaagc tccaaagagt ggcattacag |
| 12181 | agcbjggtgg agagaggggc tagccatctt ttgtgtcgcc caccgggctc atgtgtcatc |
| 12241 | gcctctcatg cagtggtgaa gttcatggat gtctatcagc gcagctactg ccatccaatc |
| 12301 | gagaccctgg tggacatctt ccaggagtac cctgatgaga tcgagtacat cttcaagcca |
| 12361 | tcctgtgtgc ccctgatgcg atgojggggc tgctgcaatg acgagggcct ggagtgtgtg |
| 12421 | cccactgagg agtccaacat caccatgcag gtgggcatct ttgggaagtg gggcaagggg |
| 12481 | gggataggga ggggggtaac actttgggaa caggtggtcc caggtcgttt cctggctaga |
| 12541 | tttgccttgt ctggctcctg cccctgagtt gcacagggga ggtatggtgg ggtcttgcct |
| 12601 | tctgtggaga agatgcttca ttcccagccc aggttcccag caagccccaa ccatctcctt |
| 12661 | ctccctgatg gttgcccatg ggctcaggag gggacagatg gatgcctgtg tcaggagccc |
| 12721 | ctctctccct ctcttggaga gagtcctgag tgccccccct tcttgggggc tttgtttggg |
| 12781 | aagctggatg agcctggtcc atggagagtt taaaaagtct tttggtgtta cctggtaatg |
| 12841 | gggcacatct cagcccagat agggtgggag ggagctgtga aacacaggga gggggttgct |
| 12901 | ttcgggtatc tactaggagt cagggtgaag cctagagagg atgaaagaag gggaggggat |
| 12961 | ggggagtggt aagaacctag gatttgaatt cccagcctgg ccaacccttg cagccatgtc |
| 13021 | ttggcctcaa gtggaacaag ggctccttga ggccagcagg gttgggggag ttggggtggg |
| 13081 | cctgagcctc tttcctgcta gagctcttgg tcctccctgc ctccaccacc catccctgct |
| 13141 | ctgcagaacc cctgggtgct gagtggcagg agccccaggg ttgtcccatc tgggtatggc |
| 13201 | tggcbgggtc actaacctct gtgatctgct tccttccttt ccagattatg cggatcaaac |
| 13261 | ctcaccaagg ccagcacata ggagagatga gcttcctaca gcacaacaaa tgtgaatgca |
| 13321 | ggtgaggatg tagtcacgga ttcattatca gcaagtggct gcagggtgcc tgatctgtgc |
| 13381 | cagggttaag catgctgtac tttttggccc ccgtccagct tcccgctatg tgacctttgg |
| 13441 | cattttactt caatgtgcct cagtttctac atctgtaaaa tgggcacaat agtagtatac |
| 13501 | ttcatagcat tgttataatg attaaacaag ttatatatga aaagattaaa acagtgttgc |
| 13561 | tccataataa atgcbgtttt tactgtgatt attattgttg ttatccctat cattatcatc |
| 13621 | accatcttaa cccttccctg ttttgctctt ttctctctcc ctacccattg cagaccaaag |
| 13681 | aaagatagag caagacaaga aaagtaagtg gccctgactt tagcacttct ccctctccat |
| 13741 | ggccggttgt cttggtttgg ggctcttggc tacctctgtt gggggctccc atagcctccc |
| 13801 | tgggtcaggg acttggtctt gtgggggact tgtggtggca gcaacaatgg gatggagcca |
| 13861 | actccaggat gatggctcta gggctagtga gaaaacatag ccaggagcct ggcacttcct |
| 13921 | ttggaaggga caatgccttc tgggtctcca gatcattcct gaccaggact tgctgtttcg |
| 13981 | gtgtgtcagg gggcactgtg gacactggct cactggcttg ctctaggaca cccacagtgg |
| 14041 | ggagagggag tgggtggcag agaggccagc ttttgtgtgt cagaggaaat ggcctctttt |
| 14101 | ggtggctgct gtgacggtgc agttggatgc gaggccggct ggagggtggt ttctcagtgc |
| 14161 | atgccctcct gtaggcggca ggcggcagac acacagccct cttggccagg gagaaaaagt |
| 14221 | tgaatgttgg tcattttcag aggcttgtga gtgctccgtg ttaaggggca ggtaggatgg |
| 14281 | ggtgggggac aaggtctggc ggcagtaacc cttcaagaca gggtgggcgg ctggcatcag |
| 14341 | caagagcttg cagggaaaga gagactgaga gagagcacct gtgccctgcc ctttccccca |
| 14401 | caccatcttg tctgcctcca gtgcbgtgcg gacattgaag cccccaccag gcctcaaccc |
| 14461 | cttgcctctt ccctcagctc ccagcttcca gagcgagggg atgcggaaac cttccttcca |
| 14521 | ccctttggtg ctttctccta agggggacag acttgccctc tctggtccct tctccccctc |
| 14581 | ctttcttccc tgtgacagac atcctgaggt gtgttctctt gggcttggca ggcatggaga |
| 14641 | gctctggttc tcttgaaggg gacaggctac agcctgcccc ccttcctgtt tccccaaatg |
| 14701 | actgctctgc catggggaga gtagggggct cgcctgggct cggaagagtg tctggtgaga |
| 14761 | tggtgtagca ggctttgaca ggcbjgggag agaactccct gccaagtacc gcccaagcct |
| 14821 | ctcctcccca gacctcctta actcccaccc catcctgctg cctgcccagg gctccaggac |
| 14881 | acccagccct gcctcccagt ccaggtcgtg ctgagcaggc tggtgttgct cttggttccg |
| 14941 | tgccagctcc caaggtagcc gcttccccca caccgggatt cccagaggtt ctgtcgcagt |
| 15001 | tgcaaatgaa ggcacaaggc ctgatacaca gccctccctc ccactcctgc tccccatcca |
| 15061 | ggcaggtctc tgaccttctc cccaaagtct ggcctacctt ttatcacccc cggaccttca |
| 15121 | gggtcagact tggacagggc tgctgggcaa agagccttcc ctcaggcttt gccccctgcc |
| 15181 | ggggactggg agccactgtg agtgtggaga cctttgggtc ctgtgccctc cacccagtct |
| 15241 | cggcttccca ccaaagcctt gtcaggggct gggtttgcca tcccatggtg ggcagcgtga |
| 15301 | ggagaagaaa gagccatcga gtgcttgctg cccagacacg cctgtgtgcg cccgcgcatg |
| 15361 | cctccccaga gaccacctgc ctcctgacac ttcctccggg aagojgccct gtgtggcttt |
| 15421 | gctttggtog ttcccccatc cctgcccacc ttaccacttc ttttactccc cccaccgccc |
| 15481 | ccgctctctc tctgtctctg tttttttatt ttccagaaaa tcagttcgag gaaagggaaa |
| 15541 | ggggcaaaaa cgaaagcgca agaaatcccg gtataagtcc tggagcgtgt acgttggtgc |
| 15601 | ccgctgctgt ctaatgccct ggagcctccc tggcccccag tacaacctcc gcctgccatt |
| 15661 | ccctgtaacc ctgcctccct cccctggtcc ttccctggct ctcatcctcc tggcccgtgt |
| 15721 | ctctctctca ctctctcact ccactaattg gcaccaacgg gtagatttgg tggtggcatt |
| 15781 | gctggtccag ggttggggtg aatgggggtg ccgacttggc ctggaggatt aagggagggg |
| 15841 | accctggctt ggcbjggcac cgattttctc tcacccactg ggcactggtg gcgggcccat |
| 15901 | gttggcacag gtgcctgctc acccaactgg tttccattgc tctaggcttc tgcactcgtc |
| 15961 | tggaagctga gggtggtggg gagggcagac atggcccaag aagggcbgtg aatgactgga |
| 16021 | ggcagcttgc tgaatgactc cttggctgaa ggaggagctt gggtgggatc agacaccatg |
| 16081 | tggcggcctc ccttcatctg gtggaagtgc cctggctcct cacggaggtg gggcctctgg |
| 16141 | aggggagccc cctattccgg cccaacccat ggcacccaca gaggcctcct tgcagggcag |
| 16201 | cctcttcctc tgggtoggag gcbgtggtgg gccctgccct gggccctctg gccaccagcg |
| 16261 | gcctggcctg gggacaccgc ctccgggctt agcctcccat cacaccctac tttagcccac |
| 16321 | cttggtggaa gggcctggac atgagccttg cacggggaga aggtggcccc tgattgccat |
| 16381 | ccccagcagg tgaagagtca aggcgtgctc cgatgggggc aacagcagtt gggtccctgt |
| 16441 | ggcctgagac tcacccttgt ctcccagaga cacagcattg ccccttatgg cagcctctcc |
| 16501 | ctgcactctc tgcccgtctg tgcccgcctc ttcctgojgc aggtgtccta gccagtgctg |
| 16561 | cctctttccg ccgctctctc tgtcttttgc tgtagcgctc ggatccttcc agggcctggg |
| 16621 | ggctgaccgg ctgggtgggg gtgcagctgc ggacatgtta gggggtgttg catggtgatt |
| 16681 | ttttttctct ctctctgctg atgctctagc ttagatgtct ttccttttgc ctttttgcag |
| 16741 | tccctgtggg ccttgctcag agcggagaaa gcatttgttt gtacaagatc cgcagacgtg |
| 16801 | taaatgttcc tgcaaaaaca cagactcgcg ttgcaaggcg aggcagcttg agttaaacga |
| 16861 | acgtacttgc aggttggttc ccagagggca agcaagtcag agaggggcat cacacagaga |
| 16921 | tggggagaga gagagagaaa gagagtgagc gagcgagcga gojggagagc gcctgagagg |
| 16981 | ggccagctgc ttgctcagtt tctagctgcc tgcctggtga ctgctgcctt ctctgctttt |
| 17041 | aaggcccctg tggtgggctg caggcactgg tccagcctgg cggggcctgt tccgaggttg |
| 17101 | ccctggttgc ctgagtggta ggcbggtgtg gcttagtgta gtggtgtgga cgcaagctgt |
| 17161 | gtgttgtgtc ctgtggtcct tctgctcata gtggctgttg gtcctgatgt tattactacc |
| 17221 | tctggtagta atgctgagaa gctgaaagcc gattccaggt gtggacaatg tcaacaaagc |
| 17281 | acagatgctc tcgctggggc cttgcctcgg ccctttgaag tctgcatggc tgggcttctc |
| 17341 | actcactcag tgtttcttgc tgggggaagg aattgagtct cccacttcag actgggcctc |
| 17401 | cctgaggaaa gggttgtgtc tccccactca gactgaggtt ccctgagggt agggctgtgt |
| 17461 | ctctcccctc cgacctgggc tccctgatag ggctgtctcc ccgctcagac tgaggctccc |
| 17521 | tcaggccagg gctatgtctc cctcctcaga ctggggctct gagggcaagg ggtctggctg |
| 17581 | ttcgtttagg atggggcact tttgcctaca cactgaagga gctgtagcat ccaagaatac |
| 17641 | tagatacctt taatcctcca ccagtcatgg tgacaacccc aagcagccca cacattttca |
| 17701 | agtgccccca ggatgcgtgg agggaggggt ctgtgcccat tctcctgaca ttagcctgtg |
| 17761 | agctccgtaa gccojggcct cgtttacgta cctttgtgag cccojggcat ctgtacctct |
| 17821 | ttcctttgcc catactgggg accaaggaag tgtcaagtgc atgagtgaat gtgtgactca |
| 17881 | gttcagaggg tgaggtcagg agcacagggt cgggacaggt ggctggcatc ttttaatgcc |
| 17941 | ttagcttatg ttctttatac caacttggcc tgtgctcaga gtgagggagg ccctgggggt |
| 18001 | cagggtaagc gtcagtcagg gaggcaagac tttgtgggga tttcctagac agggccaagg |
| 18061 | cacccccagc tcaccccgag gcbgtgttag ggaagtcctt ggagtgtctc ccctccccca |
| 18121 | gcaatgttct tgtggcttgt gtgtgctcag gggatgctgg gaaccaggcc tgggtagttg |
| 18181 | gtgtggggtg ctgtctgtct tggccctatg tgaaaccaag agggcgtata ttagtgctgg |
| 18241 | ggtgggggct ctgcctaact tcagggctgg atgaggggag tctcagttcc ccaggggtcc |
| 18301 | ttgggaaaga taagggactt gacattttag ggtttttagg tgattattct gctgatgggg |
| 18361 | gtttgtgtga agtgacctgg gagctaactg aagttactct aacctcccaa tacctttacc |
| 18421 | caacccccaa gctggctgta tctgggaata tcagtttcca aaattggagg cttaggactc |
| 18481 | cgtttogggg ctccccagaa gggtagggcc tgttctgcct ccttctcaca atcacccagg |
| 18541 | ggcaggggca tgctgagaaa gttcttggag gccccctttg cttcagctgg agtagtgaag |
| 18601 | ccgccgaatt gtotctoccc atcctaagtg aagcagcata tttgaaagga aagacaacct |
| 18661 | gttacctggg cctgcaacct ccaggcagct caagagagat gaggcctaca gccacagtgg |
| 18721 | gaggggacat ggggaatgga gatggtccct caccttcctg gggcctcctg ctctacgcta |
| 18781 | ccccctojgg agcctcctgt ccccagggca ggcccttgcc attgttggtc acccggccaa |
| 18841 | gcctctctgc ctcaggcgtt ctcccagaag atctgcccac tctcttcccc acaccagccc |
| 18901 | ctagagactg aactgaaaac cctcctcagc agggagcctc ttctgattaa cttcatccag |
| 18961 | ctctggtcac ccatcagctc ttaaaatgtc aagtggggac tgttctttgg tatccgttca |
| 19021 | tttgttgctt tgtaaagtgt tcccatgtcc ttgtcttgtc tcaagtagat tgcaagctca |
| 19081 | ggagggtaga ctgggagccc ctgagtggag ctgctgctca ggccggggct ccctgagggc |
| 19141 | agggctgggg ctgttctcat actggggctt tctgccccag gaccacacct tcctgtcctc |
| 19201 | tctgctctta tggtgccgga ggctgcagtg acccaggggc ccccaggaat ggggaggccg |
| 19261 | cctgcctcat cgccaggcct cctcacttgg ccctaacccc agcctttgtt ttccatttcc |
| 19321 | ctcagatgtg acaagccgag goggtgagcc gggcaggagg aaggagcctc cctcagggtt |
| 19381 | tojggaacca gatctctcac caggaaagac tgatacagaa cgatcgatac agaaaccacg |
| 19441 | ctgccgccac cacaccatca ccatcgacag aacagtcctt aatccagaaa cctgaaatga |
| 19501 | aggaagagga gactctgcgc agagcacttt gggtccggag ggcgagactc cggcggaagc |
| 19561 | attccojggc gggtgaccca gcacggtccc tcttggaatt ggattcgcca ttttattttt |
| 19621 | cttgctgcta aatcaccgag cccggaagat tagagagttt tatttctggg attcctgtag |
| 19681 | acacacccac ccacatacat acatttatat atatatatat tatatatata taaaaataaa |
| 19741 | tatctctatt ttatatatat aaaatatata tattcttttt ttaaattaac agtgctaatg |
| 19801 | ttattggtgt cttcactgga tgtatttgac tgcbgtggac ttgagttggg aggggaatgt |
| 19861 | tcccactcag atcctgacag ggaagaggag gagatgagag actctggcat gatctttttt |
| 19921 | ttgtcccact tggtggggcc agggtcctct cccctgccca ggaatgtgca aggccagggc |
| 19981 | atgggggcaa atatgaccca gttttgggaa caccgacaaa cccagccctg gcgctgagcc |
| 20041 | tctctacccc aggtcagacg gacagaaaga cagatcacag gtacagggat gaggacaccg |
| 20101 | gctctgacca ggagtttggg gagcttcagg acattgctgt gctttgggga ttccctccac |
| 20161 | atgctgcacg cgcatctcgc ccccaggggc actgcctgga agattcagga gcctgggcgg |
| 20221 | ccttcgctta ctctcacctg cttctgagtt gcccaggaga ccactggcag atgtcccggc |
| 20281 | gaagagaaga gacacattgt tggaagaagc agcccatgac agctcccctt cctgggactc |
| 20341 | gccctcatcc tcttcctgct ccccttcctg gggtgcagcc taaaaggacc tatgtcctca |
| 20401 | caccattgaa accactagtt ctgtcccccc aggagacctg gttgtgtgtg tgtgagtggt |
| 20461 | tgaccttcct ccatcccctg gtccttccct tcccttcccg aggcacagag agacagggca |
| 20521 | ggatccacgt gcccattgtg gaggcagaga aaagagaaag tgttttatat acggtactta |
| 20581 | tttaatatcc ctttttaatt agaaattaaa acagttaatt taattaaaga gtagggtttt |
| 20641 | ttttcagtat tcttggttaa tatttaattt caactattta tgagatgtat cttttgctct |
| 20701 | ctcttgctct cttatttgta coggtttttg tatataaaat tcatgtttcc aatctctctc |
| 20761 | tccctgatcg gtgacagtca ctagcttatc ttgaacagat atttaatttt gctaacactc |
| 20821 | agctctgccc tccccgatcc cctggctccc cagcacacat tcctttgaaa taaggtttca |
| 20881 | atatacatct acatactata tatatatttg gcaacttgta tttgbitgta tatatatata |
| 20941 | tatatgttta tgtatatatg tgattctgat aaaatagaca ttgctattct gttttttata |
| 21001 | tgtaaaaaca aaacaagaaa aaatagagaa ttctacatac taaatctctc tcctttttta |
| 21061 | attttaatat ttgttatcat ttatttattg gtgctactgt ttatccgtaa taattgtggg |
| 21121 | gaaaagatat taacatcacg tctttgtctc tagtgcagtt tttcgagata ttccgtagta |
| 21181 | catatttatt tttaaacaac gacaaagaaa tacagatata tcttaaaaaa aaaaaagcat |
| 21241 | tttgtattaa agaatttaat tctgatctca aagctcctct tggtttctcc ttctccattg |
| 21301 | aatccttgct ctagacttcc tcccgccccc tttccctctt cctctgggga acatggcatt |
| 21361 | tgtcttgggt ctgggaaagg tacgtctaat gtgtaggata tggggtgacc caccttgttg |
| 21421 | tgcbgggggc aaagtccttc cattttggct gagctggtcc tgggggaacc catccatcct |
| 21481 | gtcttgatat agaaggtggg aagctctggg aatgggtgga gggggagaaa cagcttagga |
| 21541 | gccaagggcc cttgcaattg gtagtgctgc cttcaggaat tagatgatcc aggcccctgt |
| 21601 | cccttagcca gggaaagaac tggccatgtc tccaagcttg ctgcccagga gacaggagag |
| 21661 | agcbgttttt gtctgtgggg gtcttgttgg ctgcaacagg ctgggagtgg gagggggatg |
| 21721 | ctgctggagg gctgtgactc cagggtgtaa cttaatttta catagtttta caccctggag |
| 21781 | ttccttgagc ctctggaaga tggacccata ggtttggtca ccactgatgg gacactccct |
| 21841 | gccccagctt gccataagct cttctctcac gtcctgctcc tgggtaaggt ggcacctatc |
| 21901 | caggtctttg acactgaagg gcagtgcttc caaattcact tcctctagcc tctcatttat |
| 21961 | tcttgcaaac catagatatg gcttgaataa atattgagcc agtcattgtg ctgctatgaa |
| 22021 | taagacacaa ttccacccct caaggatctg gtgaggatgg gtgggtgggg agacccaaaa |
| 22081 | ctataaatcc atgagcagaa aaatacataa aatgtgctgg gggcatctga tctagcttgg |
| 22141 | gagtgggagt tgtattgggg gtggtggctg gggggtggtg tcttatgaca ttatctctag |
| 22201 | gctgccactt aaagtatggt ttgaagacag ggagaacggg gojgcggagt gaaagggttg |
| 22261 | aggacatccc aggcagaagg gatagtgtga gcaaggcatg aaggtggcac ttgggcaggg |
| 22321 | gcagggagtg ggtgggcagg gtggaggctg gagacacggg caagggttag ctccaaggga |
| 22381 | gcctgcagca ccatgccaag agcctagggc ctgtcaggga tgagcagcag ccgaggggtt |
| 22441 | ttaaacactg agojgctcag tcagatagac ttttccatag gtgcctggca acagtatggg |
| 22501 | aggcagagag gccggtagag gctgttgtgg tcttccagga ggaattgtgc tggtggtggg |
| 22561 | gaagcacctt tggtgactgg cagtgccggc cattgcaagg tctcagcctc aggcagcttt |
| 22621 | tggtctagta agtgctcctt tcccaatcac tgaccacgtg ccgaccccta cattggttaa |
| 22681 | cactgaatct gcacagcagc cctgggaggt aggtgctttt tttttttttt tttttttttt |
| 22741 | gagatggagt cttgctctgt cacccaggct ggagtacaat ggtgcgatct cgggtcactg |
| 22801 | caacctccgc ctcccaggtt caagggattc tccctcctca gcctcccgag tagctgggat |
| 22861 | tacaggcacg caccatcatg cccgactaat tttbitgttt tcgtagagac ggggtttcac |
| 22921 | catgttggcc aggctggcct caaacccttg acctcaggtg atctgcccgc cttggcctcc |
| 22981 | caaagtgctg gcattacaga tgtgagccac cgcgccojgc aggtaggggc ttttttcatc |
| 23041 | ccatctggat ttttgctgga gcctttaaat tggccgcctg gcttctcctc tggccttcct |
| 23101 | ttagttgaat ctcacacaac tgccagagtg agcctgttaa aatgtgagtt aagttttggc |
| 23161 | accttttgac tcaaaacctt ccagagatag ttttactcgg agaaaaaccc aaatggcctt |
| 23221 | aaaaggcctg caccatttgg gctgcctccc tgactactca atgacttcgg gc |
| Human VEGF-B Gene (NCBI Accession No. NG_029823.1) | |
| (SEQ ID NO: 81) | |
| 1 | gccgtcccog ccgccgctgc ccgccgccac cggccgcccg cccgccoggc tcctccggcc |
| 61 | gcctccgctg cgctgcgctg cgctgcctgc acccagggct cgggaggggg ccgcggagga |
| 121 | gtcgcccccc gcgccojgcc cccgcccgcc gcgccojggc ccgcgccatg gggctctggc |
| 181 | tgtcgccgcc ccccgcgccg cojggctagg gcgatgojgg cgccccojgc gggcggcccc |
| 241 | ggcgggcacc atgagccctc tgctccgccg cctgctgctc gccgcactcc tgcagctggc |
| 301 | ccccgcccag gtacgtgcgg cccgacagcg cgcccgcccg cccgccgtgc cctctctcaa |
| 361 | ggttggcgga agtgaggagg cgacccgcgg cctojgccga ggggatctgc ggggtccggc |
| 421 | cttggacgcg ggcgtctojg gggccoggcg cgtgcatccc ctgggaggtg cccctccccg |
| 481 | ctggcccgcc agccccagtc tggggccact cctccgcccc accccgtccc ctgggcaccg |
| 541 | cogggggcgg ggctccctcg gtgcctgcag gacctgcttc ggtgggcact gtgcgcgctc |
| 601 | ctgatctgca tgcagccccc aaacatgctc ggctccgcgg cctggagatt tggcgcggcc |
| 661 | accagagcac ctgttgcgtt ttgggccagg gcaggtcccg ggtggccagg agaggacagg |
| 721 | taaagctaga gcagtggccg caggaacaga gcaatctgga aagatgtcag agaggtggtg |
| 781 | aagcctactg atgcaagggc aaagccccag ggacggtgac agggccacac cctcctaaag |
| 841 | tgtaccttgg gtacaggtct tttctctccc acaggcccct gtctcccagc ctgatgcccc |
| 901 | tggccaccag aggaaaggta atacttacaa aaactojgca ctagccagca ctaagagggt |
| 961 | ttgtcatggg ccctgattcc aggtgtccat catcttgtgt aactccccta gaagattcaa |
| 1021 | actattattc tacccatttc acagaggagg aaattgaggc agtgggttta ctgggatctg |
| 1081 | gataaacagg gcaggggaag acaggttgtg agggcagagt ggggagggct agtggagggt |
| 1141 | ggctgtgact tggggactgg ggaggacaga tgctgggagc agctgcagga aaaccagtga |
| 1201 | ggacttaacc cctaccggtc tgctcccagt ggtgtcatgg atagatgtgt atactcgcgc |
| 1261 | tacctgccag cccojggagg tggtggtgcc cttgactgtg gagctcatgg gcaccgtggc |
| 1321 | caaacagctg gtgcccagct gcgtgactgt gcagcgctgt ggtggctgct gccctgacga |
| 1381 | tggcctggag tgbitgccca ctgggcagca ccaagtccgg atgcaggtac tgggcaggtg |
| 1441 | gggcaacggg caggggatgc aggtactggg caggtggggc agojggcagg gtggatgctg |
| 1501 | gctggctctg gggcbggggc agcctggaga ctgatgcaca ggagacaggg ttggggggag |
| 1561 | ggcbggtggc cagcctcccg gctgttgggt gagcttttct cccttcagtc ttagagcatc |
| 1621 | ccctttctct ctctccctca ctgtcccccc tgttcttctc ctgagcacag atcctcatga |
| 1681 | tccggtaccc gagcagtcag ctgggggaga tgtccctgga agaacacagc cagtgtgaat |
| 1741 | gcaggtgcca gccaggccca acttctgagc tcgcagaggc caggcttggg gggtgctggg |
| 1801 | tatggtggtc cacagaactg gggaccaggt tcctaagagt agaaccaagg ggccgggcgt |
| 1861 | ggtagctcac gcctgtaatc ccagcacttt gggaggccga ggcgggcgga tcatgaggtc |
| 1921 | aggagatcga gaccatcctg gctaacatgg taaaaacctg tctctactaa aaaaatacaa |
| 1981 | aaaattagcc gggcgtggtg gojggcacct gtagtcccag ctactccgga ggctgaggca |
| 2041 | ggagaatggc atgaacctgg gaggcgtagc ttgcagtgag ccaagatcgt gccactgcat |
| 2101 | tccagcctgg gcgacagagc aagactctgc cacaaaaaaa aaaaaaaaaa aaaaaaaaaa |
| 2161 | agagtagagc caagggtagg ccttggatct ggggcaacaa agtaggatgc ttgggccggg |
| 2221 | ggtagtggct cacacctata atcccagcac tttgggaggc ccaggcaggc agatcacctg |
| 2281 | aggtaaggcg tttgagacca gcctggccaa catggtgaaa ccccatctct actaaaaaaa |
| 2341 | aatacaaaaa ttagccgcgc atggtggcag gtgcctgtaa tcccagctac ttgggaggct |
| 2401 | gagacaagag aatagcttga acctgggagg cggaggttgc agtgagccga gaccacgcca |
| 2461 | ctgcactcca gcctgggcaa gaagagggaa acacagtctc aaagagagag agagagagag |
| 2521 | agagagagag agagagagag taggatgctg ggatttcctg atcttcctct tgtttgtctg |
| 2581 | tgtctgtcta tcttactttt cagacctaaa aaaaaggaca gtgcbgtgaa gccagacagg |
| 2641 | tgagtctttt ggactccagc tgagtagggg tatggggagt acaagtgagt ccagaagctg |
| 2701 | ttgctcctct ttctcctccc acccgtcccc cactttccct tttcctctgc tccccaagcc |
| 2761 | bitgttctct gccccgaccc cagctctagg gaagactctt ccttcccacc ccagacatgt |
| 2821 | cgcttctcct ccctagggct gccactcccc accaccgtcc ccagccccgt tctgttccgg |
| 2881 | gcbjggactc tgccccogga gcaccctccc cagctgacat cacccatccc actccagccc |
| 2941 | caggcccctc tgcccacgct gcacccagca ccaccagcgc cctgaccccc ggacctgccg |
| 3001 | ctgccgctgc cgacgccgca gcttcctccg ttgccaaggg cggggcttag agctcaaccc |
| 3061 | agacacctgc aggtgaggcg tctgtggggt ggtgtttgtt tgggaaggca ccaaggccct |
| 3121 | gtcctggagc aggtccaggg tgagcctgcc agtaggagga gggccaggga aggggaaact |
| 3181 | gttgaatgtg ttgaacaaat atttaccaaa cagctgctgg cacctggagc tgtataagca |
| 3241 | agtccaacat tctaactcag gagtcagata caggagggac aatgccagca gaggatgtca |
| 3301 | agggcbgtgg tgaggggtac ctggcctcgt ctttcagagg tcagagatct cttggaggag |
| 3361 | gtgacatctg ccoggagtag aaatgtagga cacagctttt ccagcttgca gttcgggcct |
| 3421 | tcccagaagc ccctgtggta gacatctgcc cttacctacg ggcttcaaga ggccagggga |
| 3481 | catagtggaa cccttgtcca cccttacctg abitgtttct caccatccgt gtcccgcagt |
| 3541 | gaggccatgg ggtgaaatca tatgggcagg gccagtgggg gctcccgagg agtgtcagga |
| 3601 | ggggatgacc tttgcaaaag gttcatcctt cgccctgcag cctccagtgc ccagggccga |
| 3661 | gtggtgtggc aggatgctca ggttgtgatc ttagtgggcc cgaggcacac atgagtccag |
| 3721 | ggcbjgggct gcgctccagc cagcatgaac agatcacttc ctccctcctc aggtgccgga |
| 3781 | agctgcgaag gtgacacatg gcttttcaga ctcagcaggg tgacttgcct cagaggctat |
| 3841 | atcccagtgg gggaacaaag aggagcctgg taaaaaacag ccaagccccc aagacctcag |
| 3901 | cccaggcaga agctgctcta ggacctgggc ctctcagagg gctcttctgc catcccttgt |
| 3961 | ctccctgagg ccatcatcaa acaggacaga gttggaagag gagactggga ggcagcaaga |
| 4021 | ggggtcacat accagctcag gggagaatgg agtactgtct cagtttctaa ccactctgtg |
| 4081 | caagtaagca tcttacaact ggctcttcct cccctcacta agaagaccca aacctctgca |
| 4141 | taatgggatt tgggctttgg tacaagaact gtgaccccca accctgataa aagagatgga |
| 4201 | aggagcbgtc cctgcctgtg tcactgtttg tcactgtcca ggctggctgg tttgggcatg |
| 4261 | aatgtctgca tcactaaatc cagagcttgt cttgctccct cattgtgcag atggaggaaa |
| 4321 | tgaggactaa ggccocacag cagatoccag gcagggccag aattatgtat tcatcacttt |
| 4381 | caagttattg ccacgcatgg gagtcaggga tagcccagtc aatacagact gcctgccctc |
| 4441 | ctgctcttca ccagggttct tttctagaag gagacagcct tctgtggcca gagagcttgg |
| 4501 | ggtaggaccc agatctactg agtgaccttg cttgtcacta cccctgcctc tctgagcagc |
| 4561 | agtttccaca tgtgcacata gagggaacag aagattgctg tggttggcgt cctcgggccc |
| 4621 | cagagaagtt tgagactatc tttacgtaat agaaaagaac acttgttctt cctgccaggc |
| 4681 | a |
| Human VEGF-C Gene (NCBI Accession No. NG_034216.1) | |
| (SEQ ID NO: 82) | |
| 1 | acttcgggga aggggaggga ggagggggac gagggctctg gcgggtttgg aggggctgaa |
| 61 | catcgcgggg tgttctggtg tcccccgccc cgcctctcca aaaagctaca ccgacgcgga |
| 121 | ccgcggcggc gtcctccctc gccctcgctt cacctcgcgg gctccgaatg cggggagctc |
| 181 | ggatgtccgg tttcctgtga ggcttttacc tgacacccgc cgcctttccc cggcactggc |
| 241 | tgggagggcg ccctgcaaag ttgggaacgc ggagcccogg acccgctccc gccgcctccg |
| 301 | gctcgcccag ggggggtcgc cgggaggagc cojggggaga gggaccagga ggggcccgcg |
| 361 | gcctcgcagg ggcgcccgcg cccccacccc tgcccccgcc agcggaccgg tcccccaccc |
| 421 | coggtccttc caccatgcac ttgctgggct tcttctctgt ggcgtgttct ctgctcgccg |
| 481 | ctgcgctgct ccojggtcct cgcgaggcgc ccgccgccgc cgccgccttc gagtccggac |
| 541 | tojacctctc ggacgcggag cccgacgcgg gcgaggccac ggtaggtctg cgttagggtt |
| 601 | tgcggagaac ccgagagttt gctttagggt ctgcggcgga cccgagaacc tgcgcggggg |
| 661 | aaagtgtgtg tgctttaagc ttgtgtacgt gggatccaaa gttactgagc tcagtgcacg |
| 721 | ctgctttgga gaaaaatctt cttcttttta aatagaaagt tgttactaga gaggcaagca |
| 781 | agttacacga gtgaagggcc cggagaggtg cccagtgaga gatcccgaaa tctatttcag |
| 841 | actggtttcc tctggggcaa ccaaggggtc ttgaaccctg cccagtcagc ggggctctgg |
| 901 | agagtatgag ttcattttgg tcgggaaatg ctcgtttctt tccccagctg attcatggga |
| 961 | ctccaaacag attctgggac actggtgatc agtcaaccca gccttacttt cctggagtgt |
| 1021 | tcatagtctg cagagcacca ggcgcbgtga gcgactttag aaaaaaagtg tcagggactt |
| 1081 | tagtaaccag gctccagagc tttcagagtt cacttgaagt tggtcagact tgagatgtaa |
| 1141 | cgggagatta gagtcagtta gatcacaatc aagcaatgca aggcttgttt caactttata |
| 1201 | agctcttcat tcctaaaatc tggtcatgag atactgcaaa ctaagttttt ttttttcttg |
| 1261 | tttgggtttt ttgtttgttt tgttttcttt taaataagag gtgtttaatc ctttgcctga |
| 1321 | aaatgttgcc aaaatacttt tgaggcatcc tgattttgaa aaaggatttg tgtgtgttcc |
| 1381 | tacttcttac tggctcttcc aaaagagtat atctttatct aaaaagttca tacctgccat |
| 1441 | aaccatatag agtatgctta agagagttcc taaagaagtt atattcgaca tttcagttca |
| 1501 | aacacttgca gtaccccttg ctggaactat actgoggtag tttatttcaa ctggtggcaa |
| 1561 | gtggagaggt acctgtggtg tgttacagtc aactttaatt tgactgttga ttaacacata |
| 1621 | cacaatgtgt agaaaatagc cttatatttt gaaatatttt atttatattt atattttgaa |
| 1681 | atacacttaa agattgagaa gactaatttt tggaaatcaa actacctttg catttaaatt |
| 1741 | ttgggaaaac attaaaatgt tggaatgtgt aataatttaa tataggggtt aaaggaatgc |
| 1801 | ctcttgagta aaaacaatat acatgaaata gaacagactg cattctgtga atcacaaaaa |
| 1861 | taattttcag tgcctatact tacattgccg taactatagt gatgaaaata tctttctgtt |
| 1921 | cttaaatacc gcagaaatgt aataatcggc tcaataacgc ttctgataat ttgagtcctt |
| 1981 | gattttgcag tacctatttg ctatttctgc aaagtcaaaa ctagtaaaag tatgatttag |
| 2041 | taaggcaaca tctctgtatt ggttacggtc acttactttg gtttacagta agaaaatgtg |
| 2101 | cagtagagag taaaatgaga aacattccct gataagccaa tagcctgtat gagagtcact |
| 2161 | cactgcbjgg tgagtctaga attaatgtac cttgagtgtg tgtgtgtgtg tgtttacgtg |
| 2221 | bittatgtat aggtatggga ttggaggatt aaaaaagtta acttattttt aactttcaaa |
| 2281 | agtgtcttcg ttggtgatgt aaaatttgcc attggtgata tggcaaattt taccattgct |
| 2341 | gtgaaaatca ctatgcattt tbitttgcaa atgtcgcttt tcatatttaa ccatttttat |
| 2401 | attctgtatg gtgaatatgg gttagtattc tgcatgtgat gtgggttcct ttcctatgtg |
| 2461 | atgaaacatc atttcccata tgaaacatca tctctgagtt ccatagacca caaagcagta |
| 2521 | tttcattgct ccattaaagt gtcgttcccc agtgggtgaa tagagccttg acagggcatg |
| 2581 | tgtcattaat gcattcagtg aaactgctgt gtccttgcta tgaaacatgt cacacaactg |
| 2641 | ccaagaaact gatatgaaga ctctatgtct ctccctagtg gcctgtacaa gcaccacatt |
| 2701 | tagatttaag cactagagaa gaactgggga gaaatcaatt gttaattttc tataactaca |
| 2761 | tgaaccccaa gaaaatattt cagaaggtaa acagaagatg ctaaatatct ataatcccaa |
| 2821 | tagatgcaat gttttcataa ctttcaccta ggaacttttt taatatttaa aaaatcaaaa |
| 2881 | atagcacaca aactatgaac caaggttagc catccagccc ttcagcccac ccgtaaagcc |
| 2941 | atgcaaaaga ttgtaggtaa aaatcacaaa tagaatgaag atctccttat tcctcgactt |
| 3001 | atatttgcat ttactggatt cctatttcta gttatttgtg gttgcatgac ttactgaaaa |
| 3061 | gtcttaaaat gtttctctga aggatgttaa cacaaacaag acagtgtcaa aaaagtaagg |
| 3121 | caggcaaaag taaaattaac tggacatgat gggaacaaaa gagaatagca agtctgaagc |
| 3181 | tgttctattt acaatttttc ttatagtata tgattatgtt tgtcaacatc tactcttata |
| 3241 | agagatttct gacattcctc tgagtgatgc tacttatatg aggttttaga tatagaaagt |
| 3301 | tcaattcatc tttcattttg atttccactc cattatagtc ttctgaacta tgaatatctg |
| 3361 | attgatagct atttattcac aagacagtta tcaaaattgc ttcatagaaa gcagttaatt |
| 3421 | actgatctta gtggcatatg tctaagaccc gtagatctct aatcctgtcc ttttcagttg |
| 3481 | agttgagaaa gacggagggt agtggattta gatttcattt tggacttcca gttctggttc |
| 3541 | cggttcctct tgagaggaag gtcctggcct cctagttatc tccatgtgtc caacccagaa |
| 3601 | tgcbgtttct cagctcttgc tggggttttc accaacagag gaactggcgt gagactaatg |
| 3661 | aaggtttccc gaatccctgg gactgtgctt gcctgcttgc ctttggcagt cctggggttg |
| 3721 | ttattgagag taggagttta taatcattat ctgtgatgtt cataacgtgt gttaagcact |
| 3781 | tcgcaaagag ctttgcaagt tagttttgtt tttcactaca cctccataat atggacatta |
| 3841 | ttttatttca ttaaggatga tgaacccaag atctgaatga cttaaccagg aaaaagaata |
| 3901 | gatgtttttt tccttttttt cttttaaaaa aagttttatg gcatatacca acagtccccg |
| 3961 | acttagaatg gttctattta ggacttttgg actttacaat ggtgcaaagt cgatagacat |
| 4021 | tcagtagaaa ccatacttca aggtttgaat tttgatottt toctgggcta ataatatgca |
| 4081 | gtaaaatact ttctctggat gctggacaat ggaagtgagc tgtgaccagt cagccatgtg |
| 4141 | atcgtgagag taaacaacag gtactctact gtatattaaa tatattttca actcaggagg |
| 4201 | aatttgtcag gatgtagccc catcgtaaat cgagaagcat gtatgtttta gagaaatgtg |
| 4261 | gtaatgggtt tgggcctttg ggcctgtgat tcagactcct ttcagcccct ctgctggtct |
| 4321 | cctttggcac actatagcag cgtgcaggaa ggcagagaaa agcactgcgt gtgactttgc |
| 4381 | agttaggggc accttgttgc atttatttag gtcctaattc cccacaacgg gacaaacgga |
| 4441 | aataaaccca gactttcttc caggctttac cacatggtgt tcgtttgact aaagataaat |
| 4501 | tataaatgac ctaatccatg gtaatattat aagaacgact gcttaactgg aggcttaaca |
| 4561 | agattttctg acaaacggtt tttcaaagtt gtgctcaagt aacttcagtg aaagattgtg |
| 4621 | attttacctc tgccaaatga cctttcacaa ataagtggat ttggaaagaa caaatttaag |
| 4681 | ttggcagaag cgttatactt cctctgactt ctgagcatat attgtttcac ctttcaccag |
| 4741 | ttacattatt ccttgtagat gtgcatttta taaatactat atgggtctac cttttgttac |
| 4801 | aaacacatat ttgtatgtac agatttgtat aaattgtgga ttaagttatc attgattttt |
| 4861 | ctcattagaa aaaacagata tagcagagaa ctttaaacaa ggagagatgc tgatgagttt |
| 4921 | gagttatagt gtaattataa aatttactat aaatatttta ggtttgtgta attgtttttc |
| 4981 | tgaaacttac tagtgtaaat ttttggggtg gcttctttcc toggttgatt aatttttttt |
| 5041 | ttcagagttt atgtttaacc atgagaaagc agagactgtt tttatttaat ttgctttatt |
| 5101 | gggcatccat catggaatta atcaaattgt acattaaatg ctttgtcagt ggattagtac |
| 5161 | tgtttcctta tactgctcgc gccctagtgg ctttcaggtg ttaggagtta tccacgatag |
| 5221 | ttttttttcc aattttgaaa tccaaaaact cattttcttt ttctttcttt cctttttttt |
| 5281 | tttttttttg agacagggtc atgctctatt gcccaggctg gagtgcagtg gcatgatgtt |
| 5341 | ggctcactgc aacctctgcc tcgtgggttc aagcgattct cgtgcctcag cctcccaagt |
| 5401 | agctggaatt acaggcatgt gccactagag caggctaatt tttgtatttt tcatagagag |
| 5461 | agggttttgt cttgtaggcg aagcbggttt caaactcctg acttcaggtg atccacttga |
| 5521 | tctcctaaag tgctgggatt acaggcatga gccactgcgc ccggccccaa aagctaattt |
| 5581 | tcttaaatta tttggtgcta taatcctgat ctgaactgac ataaggctat ttatagtcat |
| 5641 | tattatctaa tttaaatatt tctaatcttc actgggaaaa tagtaatgta tttatttaca |
| 5701 | tgatgctgcc atcagtcctg cttgtttttg gggtgtgagt attaatatgt ctatgcactt |
| 5761 | ggtttccaga aaaattccag gttcagagac tcttgcagtc tccaggcatt ttggataagc |
| 5821 | agatggattg tagccctgtt ccacaggcct tcctccattg ctttattgcc ttggggctgc |
| 5881 | ctggaagagg cagggaaagg taatccagga attcaagaaa gaagccatgt ggatgctcct |
| 5941 | aattcctttt tacccattag taccaggttt atttgctctt taatctactt caactcatgt |
| 6001 | taatcagttc ttactagtgg cagcttcagt tctaagcagg aaattacagt tcagtgtgtg |
| 6061 | atgcaaaaaa tgtagagtga gtgatcttgt ctataacaag cttataatca ttttggagaa |
| 6121 | aataaattta ctcattaaaa atactacaag tgaattaaac tataaatcca gaccatgtaa |
| 6181 | gtggttttgt aagagagtct tgtgagttac caccagttgt tggctagcct tctgggagtt |
| 6241 | gcatgggcag gcctgggaaa ggtggaatga tatgagaccc aatgttaaaa atgagtagat |
| 6301 | gctaattaca gaaatggggg agagagggat gttttgaata ttgaagaatg acagcaaagt |
| 6361 | acagaggaag taaaggtcag ggatatttgg ggaactagaa gcaaaccctt tggtgcaaaa |
| 6421 | gtcaagagct ttaagggaaa ctgaagggag catggtggga agtgtgaaaa ccaaagagaa |
| 6481 | agtctgagtt tgagttgaaa gcagcaggag ccaatgaaga ttctttagtg gtatgctgaa |
| 6541 | agtgaggttt ttaaggagct taacctggca ttgttgcaca gaagtgtcta agaaagctga |
| 6601 | ccagaagctt ctcagaagct tctcagaagc cattttcaac tgcagggttt cttaaagtgt |
| 6661 | ctggcagtga ctctgccttt ctcattacag tggccaccca tatatggtat tcgaactcct |
| 6721 | ctatatgctc ctgattgctg gcgatgatag tggtgattac ttttgactta ctgtaggcac |
| 6781 | ccatcattgt gctatctgga tacatttaca aaagtataga aatagacatc tctgccatta |
| 6841 | tggtttgcat tccaaacgaa gcaagcagtg taaacagtgg tcatgcttag atacacatac |
| 6901 | acagaacccc ccacacacat attcatgcat acaccgctta atagttcttc agactgccaa |
| 6961 | gtgtgactta cgtgttcttt cttgcatggt taagaatttg tagacagttc attgaaatag |
| 7021 | aatatttaga caatcagaag tgtacaagat tagaatctct atatttgcac acacatttat |
| 7081 | ttgtaggtca gtgggcaatt gaaaaaaaag agaaggagag aaccctaaag tgtcctggaa |
| 7141 | attcctgctt tttaaaatct gctaaaaatg agaccagaaa ggtgggagtg gggatgtgag |
| 7201 | gaggtgggta aactaccaaa taaacaatat aaatactttg gcbgttctta taaaaggttt |
| 7261 | ttttaaatat ggtggaataa tttactcaaa ctcaagagat gccacctact agagaaagga |
| 7321 | catactgaaa gaggaaatat tcaaatgcac aactttgtgt aaaaggtaat acttacaagt |
| 7381 | ttaaaagact cacttctaaa gaagtttggc ttcaacctgt cctcatttgg acaggtggaa |
| 7441 | agatgtatat tttggggtag accagaaaga tgtggtttga cttctatagt tgaaaggttt |
| 7501 | ctatttagac atttattttg taatttaatt tacctaaaac ttcatcccta aattaccatt |
| 7561 | ttctcttact tttatgcaat agtaaagtat gcagtcataa gtgataaagg ctgggatcaa |
| 7621 | agctagctat tttgctaact gcagaaccta tgcactctgt ttacactgcc tgtgatagcg |
| 7681 | cctggaagaa ctcactgcca atatttctgc ttgtttcagt cacataactg ttgcttgtgt |
| 7741 | cagtgacgta acttgtttag agatgcagtg cagtggataa gagcacaggg tatggacatg |
| 7801 | cctttctgta ttcatgtcct gaggatgcct cttagtacct gtgtgacctt ggacaagtta |
| 7861 | cttagtttct ctctgcttct ttgtagcaca atgagtagat gctaattttt aatttttaat |
| 7921 | tttttctttt tcttbitgtc tgttttgtgt atttagttac tttatctttt tttttttttt |
| 7981 | tttttttttg agacagactc tggctctgta gcccaggctg gatggaatgc agtggtgcta |
| 8041 | tctcagctca ctgcaagctc cgcctcccag gttcacgcca ttctcctgcc tcagcctcct |
| 8101 | gagtagctgg aactacaggt gcccaccacc acacccagct aatttttttt ttatattttt |
| 8161 | ttagtagaga cggggtttga ccatgttagc cagaatggtc tcaatctcct gacctcgtga |
| 8221 | tctgcccgcc tojgcctccc aaagtgctgg gattacaggt gtgaaccacc acgcccagcc |
| 8281 | tagttacttt atccttttaa aagtcctctt ccaaaatgta gaatataatt aatgcctgct |
| 8341 | taatcaggtt gttttgagga taagaatgtg tatataggcc aggtgtggtg gctcacgtct |
| 8401 | gtaatcccag cactttggga gtctgagtca ggtagatcac ttgaacccag gagtttgaga |
| 8461 | ccagcctgag caacatgggg aaaaccctat ctctacaaaa aatagaaaaa ttaactgggc |
| 8521 | atggtgacac gtgcctgtat tcacagctac tctggaggct gaggtgagaa gatggcttga |
| 8581 | goccaggagg cggaggttgc agtgagtgag ctgagatcac cccactgcac tccagcctgg |
| 8641 | gcaacagagt gagactctgt ttcaaaaaaa aaaaaaaaaa aacagcatgt gcatacatat |
| 8701 | aaagcccttg gaaccatgat tggcatatag taagctttct gtaaatttgt gttaaataga |
| 8761 | tagtcttcat gatcagaaaa caaacaaaga atatagcatg taagtactat gtcctagaca |
| 8821 | tatgacataa ctgtgattct tcagcacctt gcaactaatt tattaaattt ttaaaattat |
| 8881 | aaattactga caattttccc aatttctaaa atatagcaag aggatataat actgatgttt |
| 8941 | gattttgaaa caggtgaagg aaatgcaggg tgtttaatca ttcagtgtct ggaggctaca |
| 9001 | tactgtagtt ctgcctataa tatgttccca cttcccctgg gtgccggggt ttgttcctct |
| 9061 | cctggagggc agcacaggtg tccatagacc acaccaaacc aaagaatctg ggatgatgct |
| 9121 | gtctccttat gtgcttcatt catacttagg tcatttggct gtaaaggatt ttggtacaca |
| 9181 | taagcttttt ataatgccat ataatttaat atgaactcat cttgaatata ttcagagcat |
| 9241 | atacattttc aagtttaaat gtttattaat gaaacatgct aatgttgcta ctttgatgtg |
| 9301 | taaatatctc atctatatta ttgccacaaa aaataaatat gcattctaaa tttacaatga |
| 9361 | aatcatcaca gaatacctaa aatatcaaca atttcactga ggaaaatata aagaaaactt |
| 9421 | aaggggagaa tgctatatgc cagagttaaa cttgtgtgaa tttgtttagg aaaatgtgat |
| 9481 | tgcactgttc ctaagggacc ctcttccaga atggtaacta gtacagcgtg tgctgtctga |
| 9541 | gatgtgcgga cactgggaca ctgggatgaa ttatggagta gatactttcc ttctctgaga |
| 9601 | gtaagctgat ttgcttgagt actctagttt attccaaata gttgattttg tttggtggtt |
| 9661 | ctctttgtca atttgccagt cagtgctgtg acttgcgtgg ttaccctgtg ctgaagacta |
| 9721 | cagtgcbjgg ggcattggag gcccgtgagc agacaggaaa aagggaggaa aaatcagtgg |
| 9781 | tggacacact tcccagctct tgaacagctg acagcatatt tttttgattc agtaacatcc |
| 9841 | agaaagtatt cacttcccta ggattccagt gcagatgtta gttggagtat tttagaactt |
| 9901 | ttgaccagat accacatttt taaacagaat tttttttctg actggaactg gaacaaagca |
| 9961 | ctaaacacta aatagaccct caggtagtat gtaagtacat taaaaattag ataatactat |
| 10021 | attattcatt cacatctcta tggagatact gtatcatctt tttaaaagca attttcgtat |
| 10081 | taatatttgt atttcagaat tagaattgta tgtaagcata taataaaatg aagctttata |
| 10141 | gttcagtgct attatgtttt cccaattata gaattcaaat taacatttta atgtgatttt |
| 10201 | cttcatagta atttttcatt gtcacactaa tttatttttc tctcaacttt tttttattta |
| 10261 | aaaatttttt ttttttttaa tttgagacag gcctcactct atttcccagg ctgcagtgca |
| 10321 | gtggcatgaa cgtggctcgt tgcagcctcc gcctcctgta ctcaagtgat ccacctacct |
| 10381 | cagcttccca agtagcbjgg atcacaggca cgtgccaccc cacccagcta ttttttaaaa |
| 10441 | ttttttgtag aaatgaggtc tcactaagtt gcccaggctg ctctcaaact cctgggctca |
| 10501 | agtgatctgc cttggcctcc caaagtgctg ggattacagg catgagccgc tgttccagcc |
| 10561 | taatttcttt ttctcttaca agtgctttgc ttacattttt attgttagaa acaggattca |
| 10621 | aataactgct tatttaatat tctttttatg tagaagaaac agtcttgaac ttgataatac |
| 10681 | ttttggttcc aacttgttaa aatattggaa aaggatgaaa catttgtgaa aataatcaga |
| 10741 | ccttggcact goggtagttg aggaagagtc atgcgtgtga gtgagtgcca ctctgagaca |
| 10801 | ggcagcactt tctcccttgt ggtaattgaa tagggtatgg gaagccgact acttaatctg |
| 10861 | cttcaggcaa gcagtgttca aagtttaacg ccottttact gaaatgacaa acataatcac |
| 10921 | cttacctaaa aggatgtgtg ggtaatgatt ttaccaaata gttcacttgg tgaacaatag |
| 10981 | tgaaaacagt tcaccttccc ttgtctttgt ttacaattaa atgagcccct ccaggtccct |
| 11041 | ccctgcccca agagtggatg aatttggcaa atcagactga aatgttaaag aaaatggtct |
| 11101 | tgactactct gttttaactg aagtgaccac acagctgcca tgaatcctgt gattgaattc |
| 11161 | ctataacctg taaaagggat tgttatttcc actcactcca aatttcttgg aagtagctag |
| 11221 | ttgatatcag ataccagatg cgaggctatt ttaaatcact gtgatttaat ttactataat |
| 11281 | atcattgcct acatggaata tttttaattc tttctttttg tttgtgtctg ttttgtgtat |
| 11341 | ttagttactt tatcctttta aaagtcctct tccaagttta tgttttgaaa aaagagaaca |
| 11401 | cttactgaga ttcatgtttg cttacaggtc atgacattta tgacttccct aaaaaacaaa |
| 11461 | ctgatccctt tgtctcagag ccaaatttta gttttaacat aatagtgatt cattgtttgt |
| 11521 | tctctctgag tcctagatct ctcttttaat tttggtgtct gtccatgcca aattagaatt |
| 11581 | ttattaaggc caaaattatt catgagtcat gaccatcaca cttaacaatt gggtaatttg |
| 11641 | aagctgcttc agatacacat taaagcaaat aatgatgtca taaattttaa tgcaatattt |
| 11701 | tttttccttt aatattggta gcagtgaagc ctgctctgtt agagaccaat tctgttttac |
| 11761 | tttagaaaaa tgtacctttg tgctcatgtc catgagagca cagtgtagtt attttattac |
| 11821 | tataatatag cacacagtga cacataactt agtaaattaa agattgaaaa tatttaaaat |
| 11881 | tggtgatttt ttgtgccatg ttgatttgac atttattctt ctatctgtct aaaactagga |
| 11941 | gcagtgctag tgtgacagcc tcaagtcatg ttaacacgac acacgtagaa gactgacgct |
| 12001 | cgggcttcct ctagtgcaaa acacctgaaa ttcaaatttt gcttttctgt gctattttcc |
| 12061 | taattaaatg tatccttgat gttgagttta actttattac acccctgtta aatatctgca |
| 12121 | atgtgttggg aaggaggagg acacatatgc ctgatttaaa tttaatataa ctgtatagat |
| 12181 | ataatttcat tttccattca atcattgaaa tgatataaat taatatatgt acagctaaaa |
| 12241 | ttaaatctgt gatgtcgaga tgaactccat gctgtccttg gtgcactgtg tattacacat |
| 12301 | gggtattaaa tgcgtgctta gtgcttagtg aatgggttag aaggagtttt tttttttttt |
| 12361 | ttttgagatg gagtctcgct ctgtcgccca ggctggagtg cagtggggta atctcggctc |
| 12421 | actgcaacct ccgcctcccg ggttcaagca attctccctg cttcagcctt ctgagtagct |
| 12481 | gggattacag gcacgcacca ccatgccagg ctaatttttg tattatttag tagagactgg |
| 12541 | gtttcaccct gttggccagg ctggtcttga acacctgacc tcaggtgacc tgcccgcctc |
| 12601 | tgcctcccaa agtgttggga ttacaggcgt gagccaccac acctggccta gaaaagagtt |
| 12661 | ttaatagata cccctgtaaa atgccaagca atcagttgcc attactaaga actgcaacaa |
| 12721 | gttccagtta aagatgtaca tgtttaagag ctgtcgttct ttaataaaat atgaccaaga |
| 12781 | tgtcttaaac atgggcttta atacatgtta ctgtgggttt cactccaact taatagcaca |
| 12841 | caaagttctg aagacacatg atttcactgg tggtacattc gcacattgtt ttctgtccat |
| 12901 | gtttaagttc attcttgtcc agaacagttt ctggttttct aagcctaacg tattaacatt |
| 12961 | tgagttaatt aaatcgatag ggagcctttt atcttttttt ttttcctatc tgggggcttt |
| 13021 | gctttcgcac tgacattagc agttcccttc ctatgtgcaa taggaaaatg tgcagtcatt |
| 13081 | ccaggagcat ggtctcctca ggaggttaaa agtgattgta acttagaggt taatgtttca |
| 13141 | ctccagagga aagtgtttca coccacttga tgatgtgocc ctgggtgctc acagaaagag |
| 13201 | tagtactctt ttttaaacca aaattttaga cacgtgttat gcaaatcttc tttataaatt |
| 13261 | acacattctt ttctttcctt ttattctttt actccagtat actattttgc aattaaaaca |
| 13321 | ttttaaactt cttccagaaa aaaacttctt ccaataactt cttacttcaa actactttta |
| 13381 | ctaatgacaa aataactatg tccatcacag tgaggaatta ttcattgttt ataccacctt |
| 13441 | gtattactta tataaatatc atcctataaa aaatactata tattgggact agattttctt |
| 13501 | aaatttaaat ttaaattctt ttggaaaatc aggttctatc agctctgttg tcttttcatc |
| 13561 | tctaattgta catcttccca ctattttgat ttatacatga tgttattata ttaggatagc |
| 13621 | tttgatttta atgtaatatt agctagtttt atggcttgaa aaacttagta catagactat |
| 13681 | attcataaat acagcactat acattctagc atatggcgtg tgcacttaat ctgaagaatt |
| 13741 | agacattttt tcctgttctg tgatgattga ttgattggtg gtgggggcag aaggtggcca |
| 13801 | gtctttggca acatgtaaaa ttttgttaaa attttgtcaa actgatttat tccattgcta |
| 13861 | aattttgaaa tcagcatttt tttaggggga atatctcgag tttatgagga cagaaagaaa |
| 13921 | tattcttaga aaattgagaa ggttttgtcc ctgtacatgc aaactagggg gtgtttagat |
| 13981 | cagagcaaat gtcttgcagc aggggttgac gccgggccat gtttagtcat caaagcatga |
| 14041 | cttctattct gggaatgtgg taattgagag gtaaatatta tttacaatag cccttataaa |
| 14101 | tctttagttg ttcaacaaaa taacttgcca tcagagttag atgatttagc taaaattatt |
| 14161 | taattgggtt attcctactt gatccaacat ttgattataa tatatgtagt agcgttaaat |
| 14221 | aatttgggat ttctggcctc tggctggctg ttgaagactt tttgttggtg gcggggggca |
| 14281 | tcctaaggaa caacttgccc tctactagca ttctttacta gaaaaagctc ctatttactt |
| 14341 | gttttttttt tcctaaatat gtgttttatt tccttttggc attgtctttc ttgctcccaa |
| 14401 | ttataattgt gagcaaatag caatcgaaat tctgtgtaac ttccagcaca gtttagtcat |
| 14461 | cagagcttgc cagcaagtat gtctattgtg aggaaactgc atttgccaca gctagaccat |
| 14521 | cagcaagtga agtcgtattg tcctctgttt tgtagttgtt ttttcctatt tatgctttac |
| 14581 | tctgattcaa gttcagcatc tcagtgatca taattgtggg gaaaaaaatt cattttgaac |
| 14641 | tataaacaga aaagatacca agttgttgta tttgaaagat tattttagaa tgtggttata |
| 14701 | ccttcaagta aaataagctg taaaataagc tgaagaacca tatatttagg cacattttga |
| 14761 | ctataaaata gatcctctac atataacaag aatagctttt tttttttttt tttttttttt |
| 14821 | tttttttgag acaaagtctt gctctgtcgc ccaggctgga gtgcagtggc acaatcttgg |
| 14881 | ctcactgcaa gctccacctc ctgggttcat gccattctcc tgccccagcc tcccgagtag |
| 14941 | cagggactac gggtgcccac caccatgccc agctaagttt ttgtattttt aatagagaca |
| 15001 | gggtttcaat gttaaccagg atggtctcga tctcctgacc ttgtgatccg cctgcctcgg |
| 15061 | cctcccaaag tgctgggatt acaggtgtga gccacggagc ctggcctata tataacaaga |
| 15121 | attgctttta tatgtctata tgtcacttca taatatttgt ttattattta gctagttatt |
| 15181 | gcctataagc cagtatttag gtattatata aaatctgagg aaaacagttc tataagattc |
| 15241 | agtaaaattc caattctata agattccaag atgtaaagtg ttttaggtat ttaaaagttt |
| 15301 | tatatagaca atagtgactc atttgttatg gtatatgaat atagacaaga acttagactg |
| 15361 | aagcaaaaaa taacaattag ttacatagct atttcaaagc ccatgcagta gttttttgtt |
| 15421 | tgtttgtttg agacggagtc tcgcbitctc ggccaggctg gagtgcagtg gtgcgatctc |
| 15481 | ggctcactgc aagctccgcc tcctgggttc aagccattgt cctgcctcag cctcctgagt |
| 15541 | agcbjggact acaggcgccc gccaccacgc cojgctaatt ttttgtattt ttttttagta |
| 15601 | gagatggggt ttcaccatgt tagccaggat ggtctggatc tcctgacctt gtgatccacc |
| 15661 | cacctojgcc tcccaaagtg ctgggattac aggcgtgagc taccgcaccc ggccagtagt |
| 15721 | ttttaatgtt cagtgaagtt aaaacatctc ccgtccagtt atgctgtgta ataaatatta |
| 15781 | aagcaggaga tattagaaca atacaacact tactgtgcta tttataattt aaaatattaa |
| 15841 | agataaataa tggaataact ataaatattg atactatgat aaaactttta gcatgtctaa |
| 15901 | gttgttcatt ttgatagata caaaaaacca aagccaagca aaataaaaca cacctaaaac |
| 15961 | tttatgaatg ttaacaattt tctatttttg ccataaatct ttggccgttg caccatattt |
| 16021 | tattgaataa aggacagttg ttaagctagg gcttggtcca ctgbitgtca gtatcaggat |
| 16081 | gtgatgattc ttttctgacc catattcttc tctctctttg gctttggttc tcttgtacga |
| 16141 | ctcttctgta ggtggccttg gccacacctg tgaaatatag ggcacagttg tgctgcttct |
| 16201 | actcattgtg aacttgatca tabittttgt attgtgcctc tcttcattgg ctccttttta |
| 16261 | ttttagtgta attcaaagtg ttaattggag gttttaaatg tagttttgac caaattgtgt |
| 16321 | ttgaggtcac atgtacccag tttaaaaaac gaagaaaaaa attcaactca cttcccagcg |
| 16381 | tcctttgcag ctaatgttgc cctcgaatag ttcttgctca taagagaaaa tctagcaggg |
| 16441 | atttatggga aaacttttgc ttttttttgc taaggcactg cttttcttct tgttccctta |
| 16501 | tttccttcca tggaaatcag aaaatgtttt ataattttaa aactttacct ttgtttctca |
| 16561 | aaataacact ttcagactta tgtaaagcaa gattttaata attaatatgt tgcctcgatt |
| 16621 | atggagtaac tttccaaagt tgtactatca tgatcttaat ttattgaccc ttagggttaa |
| 16681 | gataatttgt gtgtttataa cctaacattc tttgcttggc tgatagattc ctttaaaatg |
| 16741 | ttabitgttt atattttgta catactttaa gaagctttat tcaattgcca catttcaaat |
| 16801 | aaataaaggt tctttttttt ttggtaagcc tatacctttg tttcttctag cttttaaaag |
| 16861 | tgttaatagc gtgggaatga cccttgacca tctctgattg tttgggaaat ggtaactaga |
| 16921 | aagaactgag agaggacaaa cttggatgag aagtctcaga actgatagta aaaacaaatg |
| 16981 | caaacaagaa aatatattac gtacttcatt cagattaata agtaattaaa cacttgaact |
| 17041 | attcaaaaat ctagtttgag tctaggcttt tgcaagcctg aatttgtcat cataatcatc |
| 17101 | aaaattagaa attacgaaag aatgttaatt taaatttaaa acagctggaa atacaataca |
| 17161 | tggcctataa gcttatcttc tcatctgtca acaactgctt gcatatgtca catgaactgt |
| 17221 | tttaactgca attacaaaag tcaatggaat gtttagaggt gattcaaaaa atgtgattgg |
| 17281 | ctgacatata gagttatcct aagaaacagg ctgtccaaca caattttaaa tatactcaag |
| 17341 | ctcttttata ctgattaaga gtttcaagtt aaggttttgg gttaaaaaat caacatcaaa |
| 17401 | tgataaataa gaaatataat cttgtttaaa ttatttattc taatagttta tttatgaaca |
| 17461 | caacatattt ctctttcatt actttttttt tctcagttgt aaaattctag agctggagcc |
| 17521 | cataggccaa tccgtagtat atctgaaatg attaaaggtt ttatacttga caagccctct |
| 17581 | gtctgcaggt tacttgcttc tacttggagc agtggattta tcatcctcca ctccagggta |
| 17641 | aatatctaaa agtcacttct gccacgttat ttcccatctg gtagattgtt ataatacctg |
| 17701 | tgagtcagta ttatctgcac agtgtatttc ctotgctcaa ggcactttga ccatatgagg |
| 17761 | tgttcacatc tgatcaatcg ggctgaagct tgccctagtc tgaggctgga ccaattgatc |
| 17821 | tctaacgata ttcttacctg acaatctaga ggatacaaat caagatgttt caagtgcaga |
| 17881 | aagcaacagt aaagcataag ttcttttttt ttttttgcat tctttttttt tttattatta |
| 17941 | tactttaagt tttagggtac atgtgcacaa tgtgcaggtt agttacatat gtatacaagt |
| 18001 | gccatgctgg tgcgctgcac ccactaacaa gcatatgttc taatgtgtaa tatatcttca |
| 18061 | agacagtctg gaccatgaag tgtattttta cttattgagt gtatatggga ggatcatttt |
| 18121 | ataggattgg ttatattttt ccatttcttg attctttgat acttaaattt ttggtttcat |
| 18181 | attctcctct ttcacatgtt gtccccattt tacatatgca aagatagttg tttgccacaa |
| 18241 | aaataaacat ttaacagact ccaaacacat agactgtgta attagcataa cgaaataata |
| 18301 | gtggctgagt gacgagcaga agtgattcac tcatttggct ctgtggcttt caaagttatt |
| 18361 | aatgatgtta catattcttc tctattttat ttaaaaacta acactcataa agttaattct |
| 18421 | cataattttt gcbjggttta ataattcaaa atatgaatca aaatttttat ttattatgca |
| 18481 | gtttcattct attaaaatta tctgctaaat taatattaag tagtcctata gcatatatta |
| 18541 | tttaataatt gcaagtagtg acatatcata aataaactgt ataatatgta ttattgattc |
| 18601 | tgttattttt cctagcaatg cacagggaac cagtaaattt cacaagcaga gaatactaac |
| 18661 | ttgtcattta tttaatattc taaacaaatg aagccgcctc tataagtgaa ttttctggac |
| 18721 | ttctaaagat gagcattgtt gagtttaata actcaaattt ttattgtgtt aagtaaagta |
| 18781 | tattaaatat aacctcaccc taatgactca gctgtaatta aaaaagagtt cacgaccagc |
| 18841 | ctgggtaaca cggtgagacc ccatctctac aaaaataaaa aataaaaatg aaaattaaaa |
| 18901 | aaaattagcc aggcatggtg gcatataccc aagtactccg aaggccgagg gtggaggatc |
| 18961 | gctcaaacct aggagtccaa ggctgtagtg acctgtgata gtgccactgt actccagcct |
| 19021 | gggaaacaga gcaagaccct gtctcttaaa aaacaacaac aaacctacac atgaaaatta |
| 19081 | ttgctgcttc ccatcaattt tcagtgctat ctttatttaa cctctctact atttgccttc |
| 19141 | actttttaaa attttgcttt tattcttctt tctttggtct ccttctctaa aatttttccc |
| 19201 | ctgcttctgt ttttttgtat actaggaaga catttattat ttttataggt atgatcaaat |
| 19261 | tgtaaaataa gtttatttca ttctctggtg atttcactaa ctattttgag agtatcagtt |
| 19321 | aaaatgggat ttgtttgtgt gtaacaaaat ctaactgtag tggctaaagc aaattggagt |
| 19381 | ttatttttct ctagtaacta aaaggcccca gtgggcgttt aagggctggt accacatgga |
| 19441 | gcaacatcat atcatcaatg tccagactcc tgtgcttttt tcacttgatc atttttagag |
| 19501 | tttggccttc tgtgcttcat tcctcgtggt cacaacatgg ctgattgttg tgcagcttta |
| 19561 | tgtctgattt caaggaagaa agaatagtga gagaggaggt tgttgcctta acacattcaa |
| 19621 | accaaagcaa aagttttctc tgaaatcccc agtagatttg cccttacatc ttctcaggta |
| 19681 | gaagtgcatt tttgccattc ctggctgtaa gagaagccga taaagaaaat acatgcactt |
| 19741 | tctaacaata ttgaaattct tttcacaaag aaggaaagga gaatgaatgt actttgggta |
| 19801 | ggtatcgtgg tctgttttat gttgctgtaa atcacaaact ggatgattta taataaaaag |
| 19861 | aaattagttt tcctcacaat tctgaagact ggaaagtcca gggttgcagg gctgtgtctg |
| 19921 | gtgagggcct tcttactgtg tcttctcatg gtggaaggca tcacatcagg agagatttct |
| 19981 | ccagagtgca agaacaggtg gaactttata taacaaactc attcctgtga taaggagccc |
| 20041 | actcccaaga taataccatt aatccattca ggtgggcaga gcctcatgac ctaatcacct |
| 20101 | tctgaaggtc ccacctttca atgcttttgc attggggatt aaatttccaa cacatgaagt |
| 20161 | ttggggaaca cattcacgct gtagcaggag gcaaccacat ttgtgacatt gcgtcattgt |
| 20221 | actttctaga tttgttttct ccaggttgtt tgcaacgttg atgtactctt tgtataccca |
| 20281 | cctgaaagat taatgttact gaagtattgt gtttaagaaa gaaagatgaa tgctaccatg |
| 20341 | taagaccttt tgactgtcca aaagattaaa attccagttt ggagaggtag cacttacatg |
| 20401 | aaaaccttat aaaacatgag aacttaaact tgctaatttc attgtgtcaa atcgcataac |
| 20461 | agagaaagga aaaacttgaa ggccactcct cttgaaaaag tatttgagta gtgtcgattt |
| 20521 | cagtgtaaga ccaattaaat aatgtcaaat taagtaaata taacattaaa atattttctt |
| 20581 | taacatattg gtgttgattt cacttttact ctgtaatttt tgtgacattg gaaacaggaa |
| 20641 | atattcaaat tttgccttct tttggatcgt ttcctctccg tttcttaatg tgtaaaccgt |
| 20701 | aatagggctt tctgcagcca acgtgctcat tcttttcttt ctgttaggct gtgccttttc |
| 20761 | tgagaacagt tggtactgat ggagatttct gttctttttc ttcacacaag tgtcatatga |
| 20821 | aaattggggg atcagctatt ttcagatcac aggctcctct gataacagaa taccataatt |
| 20881 | ccaactttcc tgtgttgatt tgtagatccc acactgtgtg atcatgacaa acatctaagc |
| 20941 | ataagagggc gatgaatgat taaaatttat tcactcttcc cataaaacac ctggtacaga |
| 21001 | tgcagtgtgt tgtcctcaca gaggaaaaac agtggttcct ccttccaagt ggcgtgtcca |
| 21061 | cagcactggt accagataac aagaacctta gacttttctt gttgctgcag tgtgtctacc |
| 21121 | tgtgcctctc ttaagtgtct tacacgttac tcacagagaa agaaatacaa aaatggaaaa |
| 21181 | cataagctca caaaaatgca tttagtgcat ttatgatgtt aatggaaacc ttggatacag |
| 21241 | tcctctgtta tttccttact actcttgata ttttacaata ttgctttatt attcaaattc |
| 21301 | ataatcatat atgtgttaaa caattttttt tggtaagtag actgtgtatc aaacttaaga |
| 21361 | gggatttgac atggaaagac atttaaaaga tggcagaaaa cagctattat aagggcattt |
| 21421 | gaactttaga tattttccgt tggtcagttt ccatagatca tcatctgatt cactagggtt |
| 21481 | tggccagttt atattattta aattgtttcc cctgcaactg tagtattttc tttaatgttt |
| 21541 | tgaattattc ttaatgtgac ttgaataagg gtaattgtca catatgctga tgttttccca |
| 21601 | ttaggatgaa aatatttaga aaagctgtac tagcaaaaac caggttaact tgttttcaaa |
| 21661 | gtagaattta attattttat ttcaagcttt gattcctttt ttaaaaatta agtaaatgtc |
| 21721 | cttgagagca atacctttgt gtgtgtgtgt gtgtgtgtgt gtgtgtatca gttacttgca |
| 21781 | ccttcaattg aatgaaagac agtagtaggt tgtattatgg cagaggggta gaagaatgga |
| 21841 | cattctcatg ggtatctcaa aggtcaagtc agaattggat tccctgtgga tggaagagag |
| 21901 | gagtggagaa ggtgcttctc atgtggaaaa acaagaaaag tctatgacag gcctcagtgt |
| 21961 | ttgccagctg cagtggaatt ctcatagctt gtattgaact ctgtgtccta atcttctgaa |
| 22021 | accacctcaa gagagtatat attgctaaaa taggagctca gctatttttc aggggcagtg |
| 22081 | atccagagga cactataaca gaaatagata atttcaaagt cgaaaatata ttagatacta |
| 22141 | tttttattct ctatctggaa agtctgtata gaggctttat tctggtctgc tttctcagat |
| 22201 | aaatatccta ttcaggtcac tggaaataat atgtcaggtt ttaaaagaga cttcatatgt |
| 22261 | agccaaataa acctgctaag catatttaga aaatcatgct agtgactagt gtcttaaact |
| 22321 | gtttccacaa aaacaatgct gttaatagta ggatttaccc ttttgcattg gaaatgagtt |
| 22381 | gtcaaggtta aaaagatgag tagccagata ttcttgctaa acatgttttg agaagaaatt |
| 22441 | taataatata aagtttttgt taaatgtggc ctattaattt taaacaataa tactgactga |
| 22501 | agtcattagg tagctgtgga aagaagttag cctggttttt actaatgtag cttttctaaa |
| 22561 | tattttctgc ctaatgagaa aagagggata agatccaact acaattggaa gcttaaatat |
| 22621 | ttaatcaagt ttgcagaact actattaaga tcatatgtaa ctatcagata ttttttaatc |
| 22681 | tgaggacttc tttctagtaa atagaaattt cttcccaagc attataggaa tatgtcttat |
| 22741 | tgacttattt ttttggcatg ggttactagg aaataatatt ttcagggagt tcagggaccc |
| 22801 | agatttgatt cccagataat tcagattaac cttctttaat cattctattt tatgttatta |
| 22861 | ctggagagta cagggtaggt tgaaacagca taaactgcca aatcagaact ggatttgaat |
| 22921 | ttagtgatgg gcctcaggag ctgtatgacc ttaattctgt gagtcaggct ttctgagtca |
| 22981 | ggctgtgaac tgggcaaaat agtgtatacg ttacaacatt gtaacagagc tcatttaaag |
| 23041 | cattgtctca tgttagctac tgataaagca ttagttccca ctccagggcc tgttagaatt |
| 23101 | ctaactccat ccctgtgagt catgttcatg ctttcgtggt tctcatttga ggttttgtga |
| 23161 | ccaaaggccc cacagatgga ataaaattaa tctaaatagc catttattaa tgtaatatct |
| 23221 | gctagctaat tacatattta ttaaatataa ataacaaata gctccaagat accagtgacc |
| 23281 | tccatgttgc taaagccaac agttattaga acttctctgt tctgtgagct tttctgtgat |
| 23341 | ggtcacaggt gagaccgcaa gaggacacac aggagaggca caatgaaaca aagtttatta |
| 23401 | tactcatagg tcttagacag gaggtcaccg catgccacac agggtcacag ggtgtcttag |
| 23461 | tttgttcagc ctgctataac aaagtgtctt agactggata atttataaag aacagaaaat |
| 23521 | tcattgttca tagttctgga ggttgggaag tccaagatca aggagccagc agattgggca |
| 23581 | tctgctgagg gcccactctt catagatggt gccttgttgc acgtccccct cacatggtga |
| 23641 | taggggtaag gaggaagcag gctctcccaa gcctctttta taagggtacc aatttattct |
| 23701 | tgagggctcc accctcatga cctcatcatc tcccaaaggt ctggcctctt aataccaaaa |
| 23761 | cgcbjgggtt gatattttaa catgtgaatt ttggagggac attgacatta cagaccacag |
| 23821 | cacggggggt ggggggtggt tctccatgtg gcagaagaca ggaaagagga gagagcttat |
| 23881 | gccacagcct ttactggagt ttcagggtaa aggcaaggca gagtagagta gggtaaacag |
| 23941 | tttagaactg gctggtttga atactttcag taggctctaa ggtataggat taatccctag |
| 24001 | ttgcttgata cctgacagtg ggaaattaag gcagaggaat attgtctcct ggggtatata |
| 24061 | gccagataaa ggaggtatgg ctctggattg ggtaatttgc ataccaaagg tgttctccct |
| 24121 | gctgaggttt ttgctgtctg taaggattgg cagcccctgg agggccatct ctcccaagcc |
| 24181 | ataaactttt ttttaagatg tojaaatatc atagtactca gaaaaatttg aaatatatat |
| 24241 | atatatatat atatgtataa aacatcctct tacttggcag catttacaat gtttgatcat |
| 24301 | tatttttcag ctttgtcttc aatgcactca ttttacctca gtggtggtta ctccatccca |
| 24361 | ttctccactg ctggctactc tccttgaact tttaatgtcg aagtgttcag ggctcagccc |
| 24421 | actgtcctct attatttttc atttctattc actctcttag tgatttaacc cagtcccatg |
| 24481 | gttctagata tcttcatatc tgtatcttta gtccaaatct gtcttcttaa ctttaaaata |
| 24541 | taactagctg cotttgtcat ttccactcag atggctaaca gacacttcaa atttaaacat |
| 24601 | tcccagttga aatttttatc tctccgtttc tgatcaaatt tgctctagct ctacctatag |
| 24661 | ccttccctaa ctcagtcagt ggcaacaaat tgctccgagt tggtcaagtc aaaattcatg |
| 24721 | gtatcatcct tgacttcttt ctttcctacc ctacattcag actcatcagg gaatccaatc |
| 24781 | ctcttggctg tgtcttcaaa aatataacca gagtctaacc acttgctaca tctctgacct |
| 24841 | gagccaccat cgtcttccac ttggatcagg gcagcgttct gtttaccagt ctcactggtt |
| 24901 | cttatcttca cctccctaga gtgtattctc aactgagcag aaagaagaat ccttttagga |
| 24961 | tgtaagtcac attatattcc tctcctgtta tatgtaaggc cctagaatag ttccctactt |
| 25021 | cacaaaaagt aaaaaccaaa atctctatca agtaatagta gtcattgccc tggcagtgtt |
| 25081 | tcaattaaaa gagtttaacg actggttcat tttatagagg tgtggacagt gtcaaggaaa |
| 25141 | cagaaaagaa caaaagaaca tgaagcatcc aggtactatc aacagtggga agtcctaact |
| 25201 | accctagtcc tgcaggggca aggtgagcga atagtgctat cagccctgga aattgctggg |
| 25261 | cactgtagga gaggggctgt caatagaagc tctaactgta gagtgcacac acttctctca |
| 25321 | ctatggtgag gcaccataaa tgtggtgagg cagagggaga gtgaggagaa tgaatatcca |
| 25381 | acctattttt tcttcacatc ccagccaaat acttggcatt gttagtcttt tttattttag |
| 25441 | ctattgtggt ggtgatgtaa tagcatccca ttgtggtttt attttgcctt ttcatggaaa |
| 25501 | ctgatgaagt tggacatctt ttgacaagct tgttgcccat ttggatatcc tcttttataa |
| 25561 | aatgcctgtt taagtgtttt gttcattttt ctttttggtt gttttttttt tttttttttt |
| 25621 | ttagatttct acaattcctt tacatgattt ggttgccagg ctttttaaag ctgtgtgtat |
| 25681 | tgcagatatc ttcttccatc tcttactggt cttttttctt tctttctttc ttttttttta |
| 25741 | ctggccagat ttctttaatt ttaatgtaag gtgatttttt cttgtttttc ctctatgatt |
| 25801 | aatatttttt atgtcttgtt taagaaacat ttgtctatcc aatgttatga aaatagtctt |
| 25861 | gtagaagctt tattgctttt tcactttcag atttatattt acgatcaacc tggaattgat |
| 25921 | atttgtgtag tggggagggt agaaatcaag actagttatt tttaatttgg ataactaggt |
| 25981 | aacctagcat atttctctgc tgctctgtag cattaccctt gtaaataaat catgtctcta |
| 26041 | tacggtttct ttctggactc tgttttacga ttgtatgctc tctggcatta gtatcacact |
| 26101 | gcctgaaatt ctgaagttcc atagtatctt ttcttttcct tgtttttttt tttttttttg |
| 26161 | agacagagtg tcattctgtc acacaggctg aagtgcaata gtgcaataat ggctcaccac |
| 26221 | agccacaatc tctcagggtc cagcagtcct cccacctcag tctcctgagt acctgggact |
| 26281 | acaggtactc accactacac ttggctaatt ttbitgttct tctgtagaga taaggcttca |
| 26341 | ctatgttgcc cagactggcc ttgaactcct gggttcaatt gatcctcctg catcagcctc |
| 26401 | tgaaagtgct gggattatag ctgtgagcca ccatgcacag cttcattgta ccttaatatt |
| 26461 | tgacagaaat acctacagtt tgttctttaa tatcaccttg aatatagata ttgagattcc |
| 26521 | attgaatcta aaaattgatt tggggaaaac tgatatatta gcaataatgg gctttctatt |
| 26581 | ttggccttat agcatttatc ctattatata atcattttta agtttttctt tttgtgtaga |
| 26641 | gaccttgcat atcttccttt toggtaccta ggtatgagac attttggaag ctatggcaaa |
| 26701 | ggatatttgt ttttgcattt cattgtcttt ttttttctgt gtatagtatt ctaggttggc |
| 26761 | atttattttc tatattctaa agattttttt ccatattacc ctctgttttt tattacatcc |
| 26821 | actatcaatc ttattgttgc ttotttgaac aagaaatgat tttcactgtt agcatttaaa |
| 26881 | attctgtctt tggggccggg cacggtggct cactcctgta atcccagcac tttgggaggc |
| 26941 | caaggcaggg ggatcacgag gtcaggagat tgagaccatc ctggctaaca cggtgaaacc |
| 27001 | ccgtctctac taaaaataca aaaattagcc gggtgtggtg gojggcacct gtagtccagc |
| 27061 | tactojggag gctgaggcag gagaatggcg tgaacccagg aggcggaggt tacagtgagc |
| 27121 | cgagatcacg ccactgcact ccagcctggg cgacagagcg agactctgcc tcaaaaaaaa |
| 27181 | aaaaaaaaaa aaaaattctg tctttggatt tcagtagttc tattatggtg tagtatttta |
| 27241 | gatgtagctt tcttbitgtt taatctgttt gatgatcata gcaatttttg aatctacagc |
| 27301 | ttgatgcttt ttgttatctt ggaaaatcct agaaaactac ttctttaaat atgccttttt |
| 27361 | ctttatagtc tctatcctcc agttaaatat atattaaaca tttgcagtat ctgctctata |
| 27421 | tctctatgtc acttttccaa tcatctatgt ctattatgct tttttttttc tagttttctc |
| 27481 | tggatgtttt ctactgatct gtcttccagt tcactaatcc tttctttagc tctaatatta |
| 27541 | ttaattccat atattgagac ctattttcag ttattacatt ttacagttct caaatttctg |
| 27601 | ttttgtaaaa taaattctat tctttgctca aattcttcat cttcctttct gttttctcaa |
| 27661 | acatactagt tgtagtactt taacaatacc tatttctttt ttttgaggca gagtcttgct |
| 27721 | atgttgctga aggtggtctt gaatttctgg gctcaagaga tcctcccagt tcagcttcct |
| 27781 | gagtatacaa tacctatttt aatatcaagc acaactgaag tttcattttt attgtctatt |
| 27841 | ttttctattt ttttgttagt cttatttgtg gatatttttc ttatttgctg aaaacttttg |
| 27901 | attgaatgtt tgatgtttta tttaaaaatt ataactgtct agactatgca gttttgcctt |
| 27961 | tctagagagg attcagtgta tcctctggta atcagccaaa aggcagacag atcactccag |
| 28021 | ttccattaga atatgacatg gctagaagct tttctgaagc ctgbitgtat cagtctggta |
| 28081 | tggcctaccc actttccttg ggagttgtct ttcaggatac ccattcagag cctatgaatt |
| 28141 | tatgagattt tttttctttg gtgggttctg aacttcaatt tttgtaacct ctgcactatg |
| 28201 | agactgttgc atacattctt gtgcttttca gaagatattt gcttggcttc tttgcttctt |
| 28261 | accatggata atttgaaaac ttagtgcctc aaaaggaaaa ccttaagtat cagggaacct |
| 28321 | catttctctc ttgttttgtg taccctctgt ccgtgatctt agcccctcaa atctgactgc |
| 28381 | ctttaaaggc ccaaacttta atgttttgtc tctccagctc tgtgaaaatg ctggcagtct |
| 28441 | cacttttgtt aactctgttg ttttctgcct ggattttcag cctcttacct atccaaggac |
| 28501 | tatcatatta tattacccaa gggaaaatgt tgctctcata atgtctgctc acctctctta |
| 28561 | ctttatgttt ctgcccagga tcttggcaac tgaaagcttg gctgtctcta tggttatatc |
| 28621 | ttcaaatagg tgtttgttgc ttttcgtttc atctcatatt ttctagttgt tctcagtggg |
| 28681 | aacattgttt tgtcacaagc tattccatca tggtcagaag tggaagttgc taagtcaact |
| 28741 | accttgataa ttattgtgcc gttagtatgg cttagtgact aagggaacac atttttgttt |
| 28801 | ggataggcct ttggtttaaa ttcctcttac tatgtttgag ataccgttcc attgaaaact |
| 28861 | tagttttatc acctgtaatc agaaaaaaaa agaccttttt ttagaggact cttaggagga |
| 28921 | ttaattggaa aatattcacc taaagtactg attacaataa ccatcacata gtaaatttag |
| 28981 | taaatatgtc tcaaatgata cagaaacctt atggaacctg taaggttaaa tcatgcattt |
| 29041 | ctgaaagtag taataatatt tactttactt ccagtgggtt aatatgaacc aaattatttg |
| 29101 | aagatatttc tattaaatat tgattacgtg aaagaatata acatatactt aagatctata |
| 29161 | acaataaatg aatgccagtg taccgctact caagttaaaa ataaaatact accagtccca |
| 29221 | ttgagtttta tgtatatgta ttccttataa atatttcatt gagtttttgc ttttgaaatt |
| 29281 | tatgtaattg gaatgatgtt ctatgcacct ctttgcaact tgcattatta taacttgctt |
| 29341 | tatcttaata tcatctctgt gattcattca tgttaactat agtttttttt cattttctct |
| 29401 | tattttcaat gtggtgagat tatgttgtat aatatctccc aaatatgcat ttattattaa |
| 29461 | tagaaatggc gtgctttttg atctttcact tttggtcctt tttccttgga attgtatttg |
| 29521 | ggaattagtt gaagatgaat ttctctagag cagctttttg tttgcttgtg ctccgcacct |
| 29581 | gtggacacta taaatagaga ccactttcaa aggtattttt ggcttaagtc tgctcgaacc |
| 29641 | acacagatag tgttacttca gaccacaact aggatgagag ctttctcctg attatatccc |
| 29701 | aaggaggaga tttctttctt ccttttaccc agagcaaatg ttgagacagg caaatttcct |
| 29761 | tgcagtctcc ttctgtagat cagagttatt tttctagttt gcccttatat tgagaggaca |
| 29821 | ctatagattt gttctagctt aacttaggga actactatta gactctttaa gagagctctg |
| 29881 | ggctctgttg cctgttaaac tgtcaagttc aaagcccagg ttcaccagct ggagcaactg |
| 29941 | ttccagggtg aatatgactt agtgttgaat actctctgaa ttatttcact ttatttttgc |
| 30001 | acccctagga atactttacc ttcttaatag atctttatat gcagacacac atatgtttaa |
| 30061 | acatatggaa gtacatatgt gtgcatgtat gtagataaat agatagatgc actttttcag |
| 30121 | aaagagtctt ctaccgaact gttagaaaca gaaatgtctt aagtctgatt tgtgctgctg |
| 30181 | tgacagaata cctaaaactg ggtacatgat gaaaaataga aatctagttt tcacagttct |
| 30241 | agagattgaa acgttcaaga tcaagttgct ggcaggtcag gagcctggtg agggccccgt |
| 30301 | ctctgcttct aaggtggcgc tttgaaggct gcgtcctctg gaggggagga atgttgctcc |
| 30361 | tcacatggca gacggacaga agagcaaaga gatagaaccc atgatacatg aaagcccttt |
| 30421 | tgtaaaggca ttaaacccac caatctgggc aaaggcttca tgacctaatc acctcttaaa |
| 30481 | ggccccacct ccccccatat tcttacattg gcaattagaa ttcaacatga gttttggagg |
| 30541 | ggacattcaa actataccaa gaaataactg attcagtttt tataagaaat tttagaactg |
| 30601 | tccctaagac ctggtgagtt tcaggcctca tgttctgagc ctacatctga catcagctac |
| 30661 | catagtatcc gctgtgcagg cagagcctct tcagtcatag gtatggggtg aaacagattt |
| 30721 | ccacctcttc cctgagcttc gctggcacag aataaatgca ttctaaagaa aactgatacg |
| 30781 | tcagagacat ctgagcttac tcttaattgc tttcttacct ttctctgtct tgggccagat |
| 30841 | tttcttccag gctgatggct tcttccaact ctgaattcta gcactctctg ctgtttcatt |
| 30901 | ttgtattcca tgccttcgtc tcttctctga tcccttccat ctgcctgaaa gcacttcctt |
| 30961 | tttattattt ctgtgtccta taataataaa gttaacaaaa gtgttaagta tatgtttatt |
| 31021 | tttccaaggt tacataggca catgtataat gtagggaaac tggctgacaa tcagagacag |
| 31081 | aagacacata cacgtgggcc cacacacatt cgttcactgt tgtccttaat gcagtattca |
| 31141 | acattacaaa ttactgtaat cttaataaaa ctgcgacatt gttttccttg tttatttagg |
| 31201 | gagcaccttt aaaaatcatg tatttgctga tttattcatt cactattgtc cttaatgtag |
| 31261 | tattcaacat tccaaattcc tgtaatctta ataaaactgt gacatagttt ccttgtttct |
| 31321 | ttatttaggg agcatctata aaactcatta tttactcctc agaaaacttg catgggcata |
| 31381 | tagttatgaa ccagtttgaa tattatgatt ttatattcac aatattttta tacttatgat |
| 31441 | cctaggctaa ggatatttat attagaatgt tcgctgagga cttaaataag ttctcactga |
| 31501 | tacttacact gaatattatc tcaatgtact tgagagaaaa ggtattgcaa gtaaaggtaa |
| 31561 | atatatgagt acatcaattg tataatttaa ttttctcaca attttaggac aattttgtat |
| 31621 | aggatctata atcatatact tttttaaata ttcacttgct tttattaaat caatcacaag |
| 31681 | aaaatacaga acgttttccc cttccacttc tgaagtggag gaaatcactt caaattcatg |
| 31741 | ggatctttga actttgccca ttgggccaga cttgcagtat cataaacttc tttttcctac |
| 31801 | ctatgtatga ttttgccatg tgcgaaacaa tcattgctag taccacgagt gagtgatgat |
| 31861 | aagcttagaa tacatccagc taagatcagt gccatttgaa gctccctcaa tatcgcattt |
| 31921 | cttcggttct ttaaaaaaaa ttcattgttt tggagtcagc atattattaa tgaatggagt |
| 31981 | atttgagggg aataaatatg actttggcaa tatcacatgc atgggaaaaa ttggctagag |
| 32041 | aaagggctaa gtctttcatt ctgtgtttta gagaacagct ttagctcgta tgaaaaaatt |
| 32101 | ctggcataga tatgtgaggg ggagtgttgg ataagaaaag gaaagagaaa aagcttgctg |
| 32161 | tggagtggaa ttctcatcac atttctttct tacctactac tctggggaaa cttcagttac |
| 32221 | agggctgata aatatttatt aagaatatat agacagtata acctaaaaac attggaagat |
| 32281 | attttagcga ggcttgagtc agattaaatc taccaaccgc taaaagatgg ctttgcctag |
| 32341 | agaaattctt ttttctttgg gagcagctat tagggaaaag cctattgcct aatatcttaa |
| 32401 | ttgaaaccta tgcataaaat tcaattaaaa atggcctata ttttgaattg tttttcaagt |
| 32461 | tacagaagaa ctttaagatc tttgtaggta atttctaaaa agcataaata tcttaaaata |
| 32521 | tatatctgta ctatcaccat taaaacttac cattctttgc tctatatttt ccaaagctat |
| 32581 | attcagagaa aataaaacct attatttcat agcctgcttt aaaaatatct cttaaaatac |
| 32641 | gctatttttc atctcctgat ctatccctca agaatatgat tttaaaactg cattacctca |
| 32701 | tttcgactta tttgttttat gtcctccttg ttattaacta tttttaattt tttctgtgta |
| 32761 | aaaacactta tttctttaca tattttctct aaatttggaa gctatgcctt cgtcaatgat |
| 32821 | accatgttaa cattttaaat ttttaaaaat attttaatat attttattca aacagtccca |
| 32881 | ataattaaat ttatttcact ggcaaatgcg atataaacca attgctgcat ctctcctctc |
| 32941 | caaaaagcat gtcttgttct agtgatgtat ttggagatag aagacttaaa ttattttatt |
| 33001 | tttttttact ttttaaaaat gagaaatgaa aactojgcta tatgcatggt gtacactgtg |
| 33061 | acgttttgat tgaagtacat tgtggaatga ttaaatcaaa ctgattagca cattatcatc |
| 33121 | tcacatactt atcatttttt gtgatgagaa tgtttgaaat ctactctatt attatttacc |
| 33181 | atagtcacca tgagtatatt acatcttcag aaattatccc ttctgtctaa ttgaaactgt |
| 33241 | accctgtaca caacatctcc ccgttgacca ccccaccagt ccccgagccc ctggtatcca |
| 33301 | ccattctact ctctgcttct atcatttgat ttttttaaat ttctacattt aagcgtgatc |
| 33361 | atgcatattt gtctttttgt gcctggctta tattgctaag cataatgccc tttagtttta |
| 33421 | ttcatctttt tgcaaatggc cggatttcct tcttttttat ggttgaacaa agtacctttt |
| 33481 | ttccccccac tgtcccaaat atatgggctc aacccccaaa ttggcaggtc taagaagtct |
| 33541 | ttccaaaggg tagtctatta catttaattt ctaaacataa gttgaagaaa agaaaattta |
| 33601 | tcctgacagt tccaaagttc aataaaaagt atagtttttg agtttttact tcagtaaggt |
| 33661 | attattttag tttottagct tttcagaaag totcagtott ttcaatggga aactctctta |
| 33721 | gggcatttaa aatataattt gctaacaatg aacttttaga tgagtaatcg tggctgctat |
| 33781 | cactggccct ggatggcagt gggatgagct tgcaatgcca aggatacagc tgagcaaatg |
| 33841 | ccactggaag ctaaataaca tgaaagaaac cagggttttg ttgtttacaa tggccatgtg |
| 33901 | atggtatgag tacaggaaag ggctagaacc tgggcatctg aggagaaaaa gcattgacag |
| 33961 | catggatgta aatgacgact ggtatttgaa tgcaatgtgg ggccagaggt agacatcatg |
| 34021 | gaaaagtatc agactttgca tacaggacac aaactaaagt aatcactagg gttagaagag |
| 34081 | gagcccactt tctggagata ggttactcag agcaagaaat gcagcaagtc agaaagctgt |
| 34141 | cgatttggga agctacttat taatgtacct tacatcctcc ctgacaacaa tcgagattga |
| 34201 | taaccacatt taattcagtt ctagtcagta agacggaggt tttctagcac cagctgccaa |
| 34261 | gattaaaaaa tgtgcatgtc ctagctctgg gaagtgtctg gtatgattga tgcttggtac |
| 34321 | ttgttcatct aaatatgaat ttactactgg gaaagaaatt aaacttctag atattcattt |
| 34381 | ggtagatcgg tgaggtgact gaagtgtggc aaacctcaca atgattatga ataaacttta |
| 34441 | ttaagaaaaa ctgaggcaat taacttattt gttcttcaaa actgaggaaa tatttgtcct |
| 34501 | cacatatatg atagaatatt gtttgctgct ggtaaccaat ctttgctttc ttctactaac |
| 34561 | aacttgtttg tcaatatgtc ttatttctca ctctaataag actatgtcta aataacttct |
| 34621 | ctcctaaggg ttaaaaatac aaagaatttt cacacataac caagtaataa agaatgtata |
| 34681 | ttattgaatg aatgagtaat ttacaaaaga aagtgttgag aagtagaata cataatttca |
| 34741 | gatttatgaa atatgaaatt tcagattcag gatctgtcca gtggagttgt gtttttactt |
| 34801 | ttatggggat taagtcaaag gcagtatatt aaatataatg gaataatatt cccccaaaac |
| 34861 | atggtaaatc tatactttcc ctgaatataa attttccttt aggacaccaa atctttaatt |
| 34921 | aggttaatta taatttcagg tagattaaag aggactattt ctctttaaac ataaggataa |
| 34981 | ttatatgaga attaaatctg tgagaaagaa ttggaacctg aaaaagacaa tggagaaaac |
| 35041 | tagcagacgg tatgttcaac tagaagaaag agaatttaaa agttaaaccc aaggtggtga |
| 35101 | ataatcacaa aaattgttaa tgaagagcac tttttttttt ttgctgatgt tctttaaagt |
| 35161 | tttttagccc tggtaataca tatttagaat tattttagaa tttgattatc tatgactgta |
| 35221 | ccaatattat tgtgttagca gtatgagtct tgctttctat tattgaaatc gttgttaaca |
| 35281 | gatcaaatta cccattatag ttttatgctc tgtgcataca gtggcatgac ttagattaga |
| 35341 | agaggtggat aabittgttc tcatattgat attataagct tttatcacag atctagggac |
| 35401 | ctttgtcttc taattcttgt gtgtttatta ttgcttattc cattcaattg gcatgtaatt |
| 35461 | gaaatggaat tgaagacaag tacacatgtg tgttccttta tggcccctaa cattcactgt |
| 35521 | ttagttatat aggtctagat tatgaatggt gcctagaaaa aaaagtatga ataaggaata |
| 35581 | attaataatg aatacttatt tccatcacct gttaacatac tctgtccatt tattcctcat |
| 35641 | tttaccgtct acatttaagt tctcttttct agccaccaag cattattgtc tagctaccat |
| 35701 | ctactgagtg tttaatatat gtccagaatt gagcagagtg ctttgtatgt aattcatata |
| 35761 | accaatctag caaacatcct tgatttttca ttttacctag ttgcctaaac cttccagcaa |
| 35821 | tctattagga agtcaaaaag cttctcttcc tctgaaatat attccaaatc catccatttc |
| 35881 | acctgttatt cttctaggct aagcbgtcat catcctttgc tctggtgatt gcaatagaac |
| 35941 | ctaattgtcc tatctttttc ttgotttaca ccottaaaat ctaatctact tcttgaaatc |
| 36001 | agggtgtgtt tcattgtaaa tgagataata tcatttctac atcttaacct agcagtgact |
| 36061 | tctttccatc atatctggac taaaatccaa actctgtatg gatgataaga cctatcagaa |
| 36121 | ttggagtacg tttttttcat ccccatcaca tgccatgccc gttcttttca aaaggctacg |
| 36181 | gctctttctt gtctaacatg taagcacatt cttttcaaag agcctggaat gttcttccct |
| 36241 | agatgggcat gactggctct tttttgtgga ggtcccagct accaattcct taagggaatc |
| 36301 | tacccttcct tatctgttct aaagtagcca cccagtttct atcatgaccc tcagtttatt |
| 36361 | gtcatcaaca cttcattttc ttcatttatt gtttattcct taattgattc tacttcttta |
| 36421 | gtagaaattc cagaagcttt aaagtgtttt gttcatagct gaatgcccag aacctagact |
| 36481 | aatttttgac attcaaaaaa tagcttataa gcatttagta cattttatta aataagaaaa |
| 36541 | tagtatctcc tctaatctca gaatattata aatttatatt gttattatca cttaatagat |
| 36601 | ttaaaaagtc atgaatgtgg gagataagcc cagggttatc cagttatttc agtggcagag |
| 36661 | tcagaatttg agctcatgtg tttcagacct tagaacttta cctatagtct ttgatgtcta |
| 36721 | catcacatta tgctccctcc catgtaccaa attattctct taacttacta tatcaactaa |
| 36781 | tatatctata aaataatctc tggcatagga atatagcatt catataataa atcattactg |
| 36841 | taatgcgttg acaatgcatt acagtaaata atgcattact taacctgata cattattcag |
| 36901 | ctgtttagat gagtcatcaa cctaaaaata tctgactggc tgtacagtaa tgtggtaata |
| 36961 | cattcatcat agagaaatta acgtatgggt tgaatattca tagtgatatg aatacaaata |
| 37021 | tgbitatcag taggattatg gatgtatgat agtttagtat ttacctagca tgtcaatgga |
| 37081 | tgataacaat tatctgcaaa tatttctgag tgttttaatt tgggtttccc tagaagtaga |
| 37141 | ctttgagaca gggaattgag gcaaggagtc tatctgggag gcaatcccag ggcactttgg |
| 37201 | caggaaaatg gtaaaatgag acaggatggg agaggaccca ataaatggta tgttatcaag |
| 37261 | cgagctatcg ttatgggtat ctggagttta attctacagg ggactctatg aaacagtgta |
| 37321 | gaacacacaa ctcagactta tcctgaccaa gatgcaaggg agcbjggtat ttatacaaaa |
| 37381 | agtcttgtta aactttggct tagggctgct ctggggagca taattacttg tctcctgtct |
| 37441 | gctgtaagtg ggcagcatgg gttctggcag taagagcaaa aactcaggga ataaagtgga |
| 37501 | gatgataaca gttgaaagtt ggactggtat ctactgaaat actgagacca tggacagctc |
| 37561 | gcaggctatt aacaaggtct tctaaactac tcatatatgc atggtaatct gcatgcattt |
| 37621 | ctgaatgtat acatctatac gaattggaac caacagatga aagtaactac atgaaaactg |
| 37681 | tgaaatatag aaattactta cctgtaatag gacagataga atatacagac aatgctctta |
| 37741 | agttcatggg tttctatttg aatgtatatg ttggtgcaga ccctgtgaca atctgtattt |
| 37801 | tcaggaattg taggtatatt tgagaaagtt atatttttat gtaatatata acagttctct |
| 37861 | ttaggactta tcagtggata tcctaagaaa cttttaaata ttttcctatg tttattcatc |
| 37921 | ccacttcaca ctggtataga tagatagttt tttgataact caaatctacc tgtggtaagc |
| 37981 | agaataatgg cccccaaaga tgtccacaac ctactccctg gaacctgtgg acttgttacc |
| 38041 | tacatggcag aaggggtttt gcaggtgtgg ttaaattaag gatcttgaga tggaaagatt |
| 38101 | atgatcctgg attatctaca tggttccagt gtctttacag gctctttata agtgaaagag |
| 38161 | agaggatgtg gagtcagatt cagaatggtg tgatgtgaaa aagactcatc tggtcattga |
| 38221 | tggctttgaa tgtggaagga agccatgagc caaggagagc atggagcttc tagaagctag |
| 38281 | aaaagggaag aaagtgtatt cttctccaga gccccttaca ggctttgcca gacaccttga |
| 38341 | tcgtagccca gtgaaaacca ttttggacat ttcacctgca aagctgtaaa aaaaaatgca |
| 38401 | tttctaatgt tttaagcaac taaacttgta gtactttaca ccagcagcaa tgagaaacta |
| 38461 | atgagctacc taataaacac agaggtaaag tcacctcaag taaaaaaaaa aaaaacaagt |
| 38521 | taagacctat gttttaaagg tcatagcagt atttccactg tccgtatgtc actgcagtga |
| 38581 | taaatgctgt gttttgacca ttgaaagaat tojaaattcg agtaagcaaa actaagttgg |
| 38641 | aattctgcct aattactctc tatttaacct cagataactt ttaatttctc tttgctttat |
| 38701 | gttcatcatc tggaatatgg ttacagtaat aatattctga cttccctcat gagttcattg |
| 38761 | taagtattaa tttgaataac ctaggcgaaa ggacgttgta gtctgcaaca tagtacatgc |
| 38821 | aattttattt ggctttgtta gcaaataata gtgctaaaag aaatcagata tccaaaagac |
| 38881 | ataaattaaa ccacataatc ctagtcaatt tgtagatttc tgagtatttc tgtatcaaac |
| 38941 | tggcaagtat atgctatatt tatgatgagt aagtcataac agttaaaaga ttgactatta |
| 39001 | attgagagta aaaattgtcc ttgttattgt cttatgcatt ttaatttgca ttttctgtgc |
| 39061 | cttaaataga aatattttaa aacaattcat gtatgcagga ataaaagcac tttagtggac |
| 39121 | tattaaatgg taaacttctc cacatcattc atgagggagg agttataaaa ctgttctaac |
| 39181 | tctcaatttc ctaaaacttt ggtaaaataa tattctatct catattctcc cttctgtatg |
| 39241 | tctttatgtt tgcaaagatt ctttggggca cagaaataaa caaatcatcc ctatgaaagg |
| 39301 | gtcatcgtag ctgccagtga ccaaaagagc tgcctgctga gcagtttcat actgttactc |
| 39361 | cagctgccat ggactcatgc gtgaggaatt cacacagcta atcaattcca taaggtgcag |
| 39421 | ttgctggctt ctctcttctt aagcctgtac ataaggaatt ggcacttgag tgtttcatcc |
| 39481 | tgtggactct acatcattcc ttcacaccct ctgccatttc ctggccctcc ccaaaataga |
| 39541 | cccaaagcaa aacaataata aacaatttgc tgtttgattt ttagtcagca ctaccattca |
| 39601 | ccagccctta agaatgccac agcagctgcc tgtcactgac bitttcagca ggatcaggct |
| 39661 | agaggtagga gaggcggggc aaaatttctc ctccttgtag gttttagtta attgctgtca |
| 39721 | atgacaacta gcagttgtgc acctgtttcc atgcatttag tttctaccct ccatcaataa |
| 39781 | attctaacaa ttatttattg aacatattct atagttttgg tccttaaaat aacatctgat |
| 39841 | tataggtact gttgttatca aatgaggaag cagacttcac aaatagcaac tgggccacaa |
| 39901 | atcttgctac caagtgtcct agccagtggt cttggaagtc taggctcttt ccctatagcc |
| 39961 | cccctgattt tattagccaa gttctaattc taacatggga aagtcctatt tcttagttat |
| 40021 | gtgtgatgta acttagattt gtgtgtaagt tattatttct tagttttgtg tgatataact |
| 40081 | tacattatca tgtacatgtg cacatttaca tcttacatgg gaaattttaa tcagaggatg |
| 40141 | tcttcatctt tgcgtcacta ctgaattgac taaagactca ctcaaagaca tttccgtttt |
| 40201 | aatagtgaag agaaggaagt gattctcttt gcatcttatc ccttcatcct acaggcattg |
| 40261 | tgctcctact gaacactgaa gagtagtttt gttggcagta accttagaac gtttggagtc |
| 40321 | aaaagttgtt gtctctatta cactcagatt gtagaaagtc agcaggccat tcggagtgcc |
| 40381 | aatatgagct atgtaaaagt catctcaaga ctggaggaag agtgactctt gaggccttta |
| 40441 | ttttccatat aaattgtgcc ctctgtttcc tagcaccttt caggatccgg ggcagcctgt |
| 40501 | ctgccatttt ccacttgttt agggctttaa aatcgtaaag aacttcatta actccatgaa |
| 40561 | ggccttcaat ttaatattga ggatactgga gtatttatca cagaaaagat acagctcaaa |
| 40621 | aattttaacg caatttcatg gaaaattaaa aaaataacta ttacattttg gtaagacttg |
| 40681 | tatactgaat ttttcagaat gtaagctaaa ttgggtttaa tcttatattt tataaaaaca |
| 40741 | aagaaatatg aaatttatcc atttattttt tttttcttta tgacatattc caaatataca |
| 40801 | gaggaggaca gagacctaaa agcctcaggg acccatggtg gggctctatc aaattctttc |
| 40861 | attttgcctt atgtttccag atattgttat gagaaaaaaa cttacaggta aattgaagac |
| 40921 | ccccatataa gccttcagaa atctcattcc ccttcctcca ccaagttaac caatattctg |
| 40981 | aatttagtat ttatattttt atgctttttt tttacgttta cacatatcat tgatctatcc |
| 41041 | aactttttgt aaattatgtt gtgctgaaca tacattcttc aacatgttat tttctgtttt |
| 41101 | bitttatgtt ttattttagg gattaagcct tgttgatgcc tatagcttta atatatatgt |
| 41161 | agaaatctgt tgtatgaccc atgggttagc aattctctgg taaaggatat tccattttct |
| 41221 | tcaaacattt tgctgctgca attagtactg tagtgaacat tttgatgttt ccttataaaa |
| 41281 | agaatggtgg tctttttagt ttgtaggaat tctttgatca ttctattaat cctttgtcaa |
| 41341 | ttatgtggtt gaaatgcctt gaattttcaa atttatttgt atgaaaatac tgacagtagt |
| 41401 | cccttatgat ttttgccatc cattctataa agagctattc gcgtttcaat tctaaaattc |
| 41461 | tttgtaagtt ttctctttca ttcttggaag actgttbitt tactctttag tctcttcaaa |
| 41521 | gaattttgtt tggttttttg gctctctcta tttctgtgtt tatatttcac tattttatac |
| 41581 | tgttgctttg attaaatcct tccttttaga ttgtttaagt acattttcat tctttttcta |
| 41641 | acttcttgag ttgaattacc ttaaatttat tattctcagt cttatagttt ttaataaatg |
| 41701 | tatttcattt attaaataaa tgtatccatt tctcttttaa cttcttccca caagtttgga |
| 41761 | aaagtattcc ttttattgta aagttctggt tctctttctt ttttttcttt ttgtcctatt |
| 41821 | gggatttcct gttataaccc atgggctact gaagttttca aacgtataga aattttttgc |
| 41881 | agaaagtttt tgcagtatct attaattaac gatttctatt gtaacatcat ggtaaaaaaa |
| 41941 | cattggttct gtaagatacc aattctttga aattgtttgt gatcttttgg aacccagctg |
| 42001 | gtggtcagtt ttcataaata gtttttgtgt atctgaaaaa gatgtcaatc cagacaggat |
| 42061 | tttatatgta tacctatgag aagaaacttg ttaaatttat gttagatctt ttctatttta |
| 42121 | ctaaattcct gcttcccctg aagggtttag gtatgcaagt cctttagaaa tctaaaggta |
| 42181 | gtaatgttag gtttataatt gaaatggctt ctcagtggac tctacgtctt ttactgtatt |
| 42241 | gtgaaccctt tgatgcattg ttttacattt ttttcttact ggcattagta ttactacata |
| 42301 | tataaatttt tttcaagtta gtatctatat agtatatttt cttcagtctc tattttaaac |
| 42361 | tttcaaaaca aatatagttt tgttttaggt tattcttgta atcatcatgt agttttataa |
| 42421 | aaatctaatt tgattatcac taatatgtga gtttgataaa tccacatagt cataattact |
| 42481 | gatatgtcac aacacagtaa gggcbgtggt cttcatttat ctgaacaact gctttacatt |
| 42541 | tagtttcaga gatcggagta ataatgaacc tttctgcatg tacccagtgt tatgactcct |
| 42601 | gtaaggatta atttaaaaat gttcaatatt tattttcctt ttggattttg ctgaaaattt |
| 42661 | aattttagaa ataaaaaaaa tctctagttc tttcaaattt tccatgaatt gaagattgtt |
| 42721 | taccgatcta tttttttaat actgcatttt ggcataattt tttaataaat gtttacactg |
| 42781 | taattttcag taattcagtg taaagctaac aggttttttt caaagatgaa gagacacaat |
| 42841 | atgttataga atatagtaca tggtgggaca gttaagtagg ggttctggag tttatttttg |
| 42901 | cttctgctac ttaactatgt tattacaaag aaaaaaatca tgtaagagac tccgccaaat |
| 42961 | tctcttctgt ataacaagag ggagtgacat actatctcaa tttcagtttt catatttaat |
| 43021 | gactcacaat tggatttttg gtatatattt gaccactttc taagatttta ttttttatgt |
| 43081 | tcttgaaaat tttatattct ataaatattt ttgtatacat atgtacctca cattcaaggt |
| 43141 | aagaaattct taagtaattg aactttgtgg ctataattaa atatatacac taatagatga |
| 43201 | cagaataaag aaaatatttt tattctgaga gcctaatttt aggtaatgaa aatcatttta |
| 43261 | tgggtaaata aagtacacat tttatagtgt gctaaaaaat acacaaaatt tgacatttaa |
| 43321 | aacaataaaa aatattaaat aacttggaat gaaaggagca tatcgaagta tttgtgaata |
| 43381 | aataatctca aattgatttt ttccaacact ataacatctc ttttctgttt aaaagaagtt |
| 43441 | taatagttgg ttcaatcttt tctttgagtt tgttttttat attttccaag cttttaattg |
| 43501 | tcagtggagg gagaggactt gagtgttttt aaggtttcca tcaacatcca ttctcctgta |
| 43561 | ttcattgtta ggccaaaagg actcaacatc tttgagtctt ccctatttga gaccaagtct |
| 43621 | atactcagct tctaatttca gctctagctt ccattcactc tcagtctttg ttagcattat |
| 43681 | ctaagtttag gttgagatta ttgcattatt gacttgcatt ataaacttct tctttcaaga |
| 43741 | ataatatgac cttttaatct tgttatatat gtttacccat catttacata aatttttatt |
| 43801 | ttatattcca tatggtttta ttccaacagt cttttgtagt taaatatttt atactcattc |
| 43861 | atcataaatc ttcaagtaat ttttagaaga attttgtaaa agtatatgac ttttttaaat |
| 43921 | tttgtgggta gactatatca ataaaatatt taaatatatt cagaaacttc ttttaaagtt |
| 43981 | catatcactt tactttggta aagagtttta gcaaaagctt ataattaaaa tatgcgacag |
| 44041 | tgctcacaga gcatttctga ttactatcag aaataggggt ttattctgga aagttgtttt |
| 44101 | cctgaaagtc ttaattgtaa aaagtgcagt ttaataccta ttatattctt atgtgtatat |
| 44161 | taatgccaaa ttaagcaatc ttcctccctt tctttcttcc ttctttcctt tcctctttcc |
| 44221 | ttcttttctt cgtttctata tttatgctgt atacgtacta cttgaaatat ccagacacta |
| 44281 | ctatttgttt aattcacaag ccatatctgg tgatatggat attattgttc ttgtttcata |
| 44341 | gttgaagaaa ctgaaacttt aatgaggttg gataagagcc acaagtatag cagattttat |
| 44401 | agtgtataac cctgcaaagc tcaaatttgg attgatatct ctgtttattc tagaaccctc |
| 44461 | ctctgtgtca ttctatgtca gtttgctttg ttgtttatta tggtaaagta atcattcttc |
| 44521 | acttcaacag ttatctgtga gttgattcta aaacatagaa aaattttgtt ttaaaataaa |
| 44581 | ttgtatgtat gtoitcacct aataatgggc ctatgtgggg tccacacaaa accagtttgc |
| 44641 | tgcagtcttg gcatagtgta aaattcccaa agtttttata tacatattga atgcctcaag |
| 44701 | gtatatttta aaagcccttg ctaatcccaa aggaattgtt ctaaaaattt gtttaaatga |
| 44761 | aatttttata tattttaata tttaaatttt aaataatatt tttaaaaatc ttaggctgaa |
| 44821 | ctttcagttt gtaattagca aagtaattat tatttgcccc aagccagctt cctcctattt |
| 44881 | cctgaccctc atttgtcttc cctccttata agatgcttaa tgaaagagaa cttgattttt |
| 44941 | gttcatttgt ttttgagaca gggtctggct ctgttgccca ggatagagtg cagtggcaca |
| 45001 | attgtagctc actgcagcct tgaacctggg ctcaagggat cctcctgcct cagtgtcctg |
| 45061 | agtagcbjgg actacaagct catggctaat gagcctggct aatttttaaa ttttttgtag |
| 45121 | agatgggggt ctcgctgtat tgoccaggat ggtottgaac toctaggctc aagcagtcct |
| 45181 | ccagcttggc ctcccaaagt actgggattg caggtgtgag gaccacgccc agccttgaaa |
| 45241 | cttgattgtt atttacatgg tgcacttaag aagcctaatc ttaccttctg acccagggtt |
| 45301 | tgcagtcaca gtccttagag tttttgaata aagactgtgc tatttctttt ttttaaaagg |
| 45361 | gatttgtttt tatctaattt atttctgcct ttatgtttac tcattattaa ttattcaaaa |
| 45421 | taagattggg atcatcattt atgtatgaat aactcaaatt agtttattgt aatacatagt |
| 45481 | cctggtgaag aagaacatat tcagttcatg ccttcaattt gcatttatct tgattagtgt |
| 45541 | ttaagtgcat ctcatttccc tatgcttctg ttttcatagc ttatataact acactgttag |
| 45601 | attttatgca tgatgtaaca ggatacaatc ccatgatata tttccatgat gtcaaagctt |
| 45661 | tgaattatgt aaataggaaa catgaagcaa aagcatacta cttattcatt atgcattgct |
| 45721 | atgojgcaga cgcacagtca agtgatgcta tttaatctcc ctatctgcat attcttaaag |
| 45781 | tgcatatctc tgtgatatcg aagcactcaa gcaatgagta aatttctgca tctggttaat |
| 45841 | aaattcagca aacaggagtt catcaacatc tggcatctgc cttattttac tggctttata |
| 45901 | tgaataactg atggatggcg acctttgata aatttagtgg ttgcttggaa ttttagtagg |
| 45961 | ggtttgatat tgtttgtgtg ctattgtgaa tttaatatgg caatcaactt tctcttggtt |
| 46021 | gctttactca tactagaaac cacagcatca accaatcaaa aggcbgttta gcatttggtg |
| 46081 | ttatcacata taccctaatt tgcacaactt tccaaaatgt aagtaccaag agagaagaca |
| 46141 | catcaataaa atataggaat tataaggaag aggaagaggt ttttaaaagt atattattat |
| 46201 | tcagcaaata atggaaactg gtgctcacaa actactaaat taagagggct tttttccttt |
| 46261 | aaaaattaat gcaatgatag tgcagaacac caaataaaaa ctgcatagcc aaggctctgg |
| 46321 | aaggttgctg gtggctcctg gacatcagtg ggatttcaca tctttctctc tgacatatca |
| 46381 | tttgttcatt tccagagaat gcccagctct gtgttttctt aaaaataagt ttagaattct |
| 46441 | cataaaggtg gacattattg gcctagcatg agttaatttt ctctacccct ggacctggac |
| 46501 | caatcatata tataagcaga gagcagaaag gtagcacaga ctgaggcaag gtgaggataa |
| 46561 | ggtatttttt gbitgtcaca gagacacctt gcttgtctca tttttgaaaa tgatgaaaac |
| 46621 | aaatggtgac taataaatag aaaatgctct gtggtattat cttctagtac taatgttttc |
| 46681 | ttcactgtcc ctggcctggt atctttcttg gcatacctca caaattactt gacttctgtt |
| 46741 | ttatgttgac ttcactcctt tacattacat tattgggaag ccctaggtct tagaaaacta |
| 46801 | tttcttaaac tgaattaaaa ttttgccctt gtacactggt actggctctg tcctctcagt |
| 46861 | aatagaaaag aagtcttcca tatgtccaca gccattattt gcaaaaagat atctctttct |
| 46921 | tcaggcttat gtttcccatg ctacatctct cttgttctct gaaccacact ttatacagcc |
| 46981 | tgactttcca tattctcact gttgctgtca tccccatctg atcattcccc tctgtcttaa |
| 47041 | aatgtgacaa ttacaactgg acataatact ccatctgtga tcttctcagg acagacccaa |
| 47101 | gcaggtccca gtatagtgtt agcaggacat cacatttttg gcttcagatg aacctgtaaa |
| 47161 | tacctaaagt acctggactt ttcccatgaa ttgttggtag gccaggatgt gtgccccatt |
| 47221 | agttggggac actttctagt gacagttcct ggaactctat ctggctattt ctctagtcag |
| 47281 | gcagtgaagg cagataaatc ctoggttcct ggcaggttca ggtggaacac gcagcacagt |
| 47341 | gtgcgctgtt gaatgagtgt tcccgagatc taatcacatg gaatgcctga ttgtcaaatg |
| 47401 | atgaacaaat aattcaggag atggacctgg gagttgaaaa tttttttaac aaaaaagaaa |
| 47461 | ttacatatat gcatttttaa caaaagtttt ataatcattg atatagtgat ggtagcacca |
| 47521 | gtagatattc aggcaagtaa ttatcaactg gatgacttat aaaggaattg ataaagcctc |
| 47581 | ccaagggatt caagaaaagg gtaaagcttg gaagtcccta aggataagtg gctgagatgt |
| 47641 | ttgattcagg acttcctgtc cttgaaacct tggtcagtta ctagcacgta ggacagtctc |
| 47701 | tattgtggac cagtaaaaag ctggttgtct ggagaattca gacagaaaag gtaaggctgg |
| 47761 | gacccagtta tcaaggctgc actacaacta gggcttgtaa aagttagggg attttggaat |
| 47821 | tagcgtagaa ataatgtaat atggtgtaag taacacaggc tttgtaatta gtgcaaaaat |
| 47881 | cataagcata tgggcttgag tcagtcttct ctttcctact tactggctgc ataccttttg |
| 47941 | tcagctattt aacctctctc taagcctcag cttcttcatt tataaaacaa attaatatta |
| 48001 | tctacactga agtattatag gagagatgat aatgtatttt ttaaaaacta gcacagaccc |
| 48061 | tggtcaacaa taataaacat actaataatt gttactatta taataaacgt gttgatatct |
| 48121 | ttttcttcat caatgacttt ataaaaatat tgggatggag atgccaaaat ctcctctgct |
| 48181 | aaatgccatc tttcatccta aggctataca ggaacaggcc ttgcctactg aactttgtag |
| 48241 | ctataggcct actacattgc ctcccacttg aaccctoggt tataaacgga atggagagtt |
| 48301 | acttttccat tcagaaaaga accttgatat ttcagaagga aaagttagcc ctggacactt |
| 48361 | gagcatttct aagaaaatag gttttttttt tctttttaaa ttgtgtacct gctgccctga |
| 48421 | attctctaga tgttctgagc actctgtata ttcttactca tagcttagta ataaattatg |
| 48481 | tttataaatt ggagactggt attgtataat ttagttcatt gaaataattt gatctggtga |
| 48541 | cttcatagcc agacagagtc aatggattca tataaatgag aatccagggt taatcaccat |
| 48601 | caaacatttt caacataaag tgacattttt ttccttagaa tgggattttt actacattca |
| 48661 | aattttacta atgctgtaaa catgaaaatt ttgagtcagg taatgaattt gagaatggat |
| 48721 | agctaatctt taaaaatcta gtaacaaatg tttctgggaa ttgtggctat tgttcccttt |
| 48781 | tggaatgatg accaacattt ttggaaatga aaatattgat aaatttgtgt ggacttaaat |
| 48841 | atggagtcca cacaagattg gggtcatagg acagaaacaa tatttgtttc acatttacat |
| 48901 | tgctgaggta ttatgaagag gttagaaagg tgatttttat ttagcttgca gaataaatat |
| 48961 | tttaaaatca cagaataaca tatactatta aatgcctaca tacatttata tccatatgaa |
| 49021 | taaaacagta gaagctgaaa tataaaataa catgccactg ctgctggaga gatttaagcc |
| 49081 | aattatctgc tatcctggag catcagacat atatatctat atctatctat aatattatat |
| 49141 | atttcataat ttatatattt atatatcggt ataatatatt gttttataca gattatatta |
| 49201 | ttatatgctg tttttcacca abittgttta catatattat acattattta tatccggtga |
| 49261 | ctacataatt gtgcatggta catcccgtct ctagtcagtt gtcatgacaa gagttttaat |
| 49321 | catttatgct tactttatga ttctattgta caatttttat tggacattat ttcagttttt |
| 49381 | attaattaac agggcatatc aaatacctcc atacacactt tattacagat ttttttgtcc |
| 49441 | caaatatttt tagcattttt ttaaatatga aaatagatag tttggaaaca agcttctatc |
| 49501 | atctactatt tcttcagtta tttgaatgca gatggcctat cacaggacac aagaagttga |
| 49561 | gaatgtgcta ggagaattgc cagcactgct caatacaggt gtttgcccag gtctaccttt |
| 49621 | tgactotctc acttgatctg ttottgtgct tctcactttc ctgggcagcc agtcccttac |
| 49681 | tgagtatttc tggccttcag tatctgcttc ttccggttcc tttgatgcag cacccacttg |
| 49741 | ggctcgcttc tgtagttcgc taaactcagt tgcttatcat tgtaatattt ccgtaatatc |
| 49801 | agaatgacta ctgtctcaac ttaggagaca tccacttgtc ttctccagca cctgactgag |
| 49861 | ttcttgccat ataaattttt gttgaataaa ttcaatgttt ggcttttcac atcatcataa |
| 49921 | acaagactta caccaacaat catgggggaa tttgaataaa attaagatta ggtctgactt |
| 49981 | ttgcaatttt acaacttaca agttagtgtt aagaaaatgt ataaagatgg tgatatgcca |
| 50041 | ttttgaaaca tattaagcat tttcatcttt agaacagcct tcaagagagt tattatgaaa |
| 50101 | cacatttaag cttaagaaag ctgagaatca gaatgataat taataattat ttgagggtgg |
| 50161 | atgaaaaagt aaagaacatt tacacagttt tagtgagaat gtaaattagt tcaatcctaa |
| 50221 | ggaaaacaat atgaaaattt ctcaaagaac taaaaataga actacagttt gacccagcaa |
| 50281 | ccccattact ggtatgoggg tggtactata taagaggaaa agaaacatcc tgtcaaacag |
| 50341 | acatctgcac tcatgtttat cgcagcacta tttttaatag caaagtcatg gaatcagcct |
| 50401 | aagttcctat cagojgggga ctggatacag aaaatgtggt acatacacac catggaatac |
| 50461 | tatgcgtccg taaaaggatg aaatgatgtg ctttgcagca acatggactc tgctggaggc |
| 50521 | cgttttccta agtgaattaa cacagaaaca gaaaatcaaa tacttcatgt tctcacttat |
| 50581 | acgggagcta aacagtggtc atgtaagcac ataaagatgg aaacagtaga cactggggac |
| 50641 | tccaaaatgg ggggaaagag ggaggagaac aagggttgta gaagccaaat tgaagcctga |
| 50701 | aacaatacac ctttgtaacc cacctgcaca tgtggcccct gaatctaaaa taaatcaaac |
| 50761 | aaaaaattaa caagcaaaca aaaaacagag gaactagggt ttgaattaat atttctgatc |
| 50821 | tgcatatcgc tattttcctc ttaaattatg tgcttaaata catgaagaag gaggaggaga |
| 50881 | aaaaaacaac ttaattagga gacttacttt aataatgtat catttataac ttttcttcca |
| 50941 | aaatctggtt acatgtcaag aaactgtata atgtgaatct ctctagttca cctttccttt |
| 51001 | cctttatgta gatcttggtt gcaattcaga ttttcttttt tctaatgaac agtacaatca |
| 51061 | gtaacagttg caccaaacat ttcaatttgc aatatacatg taatggtttt tcaagtgaag |
| 51121 | gttacatttt atcttttttt attatccata gaataatgtg ttttaggatg aaagagacac |
| 51181 | tgtgtgtgtg tactccgttt aaaattaaga tctgacggtc tgagacatca catacaaagc |
| 51241 | ataattcagt agctatctga cagtttccca attgctatga cactaaaaat aaaccaaacc |
| 51301 | agataaatca accccctaag tggactctct ggcctgaaat gttojggttt taatgtgcct |
| 51361 | gtggaatgtt ccaatataat tttcatcaat gttgattgtc cagctcacac agccctgggc |
| 51421 | actagagtga ttgacataa ccccgtcatt attccaacaa ttaaatcagc aggaattagc |
| 51481 | acaaacattt ttttcctgtt ccgtacacta aaaatgtttc catgctgcaa tgttaggatt |
| 51541 | taaatgtaac aaacataatc ttccctgtgt tgtataactt tccgatctac taagaaagcc |
| 51601 | taccaaaatg gagcatttgg tttaaaaata aatacctgga ctcttccatg tggcaacaaa |
| 51661 | caatacataa gagatattgg acaatgaaca attaattaca ttgataaaaa taattgatga |
| 51721 | attaagaatg taaatctaaa gatactttat attcctcttt ttggtttaac tttcaaatcc |
| 51781 | agaaagctct taacctggtt aactaatcga tgataacgtt atacaacaaa cttttgttga |
| 51841 | gtacttgcta ttcattcctt gaacgttatt tattgtaata aacgtgttaa ttgaggttct |
| 51901 | acatatataa aactgtttaa ggtgcaatga aacaaaaatc acctgaactt cggacaaatg |
| 51961 | tgatttttgt ctttgcttag gacgtttttg gaatatttac ttttgaaaat gtctccatga |
| 52021 | cctgtggcag tgttttcttc tgaatagtat aaatgacgat ggcaaatcta aaataagtta |
| 52081 | tttggagcca catctagaaa ataatgtgag tattccagtt attagggaag gctagatttg |
| 52141 | atcaaatata tatatagtta tatgtattct ctctctatat atagaatata tagttacata |
| 52201 | tgttctatat atagttatat atactctcta tatatagaat atatagttat atatactctc |
| 52261 | tatatataga atatatagtt atatatactc tatatactct atatagaata tatatataac |
| 52321 | tatatataga atatatataa ctatatataa atatatagtt atatataact atatatagaa |
| 52381 | tatatataac tatatataaa tatatagtta tatatattta tttataaata tagttatata |
| 52441 | tactctatat agatatatac tctatataga gaatatatag ttatatatat tctatatata |
| 52501 | tattctatat atagttatat attctatata tagatatata ttctatatat agaatatata |
| 52561 | gttatatata gttatatata ttctatatat ataacttcta tatatagtta tatattctat |
| 52621 | atatagaata tatatataga atatatgtat agaatatata gaatatataa tatatagtta |
| 52681 | tatatattct atatatcgaa tagttatata tattcgatat atcgaatata tagttatata |
| 52741 | tattcgatat atcgaatata tagttatata tattcgatat atcgaatata tagttatata |
| 52801 | tattctatag ccataatgcc tattagcctg gcatttagac ttgcaagtgt caacttatta |
| 52861 | cttaccttgt tttattttat ttctttaatg atctcaaaac cttcctctct cgatttcaat |
| 52921 | ctgtggtttg ttcccaccat ttgccgaggt ctagcatctt attctttgat tttctttttt |
| 52981 | cttttcttca acttttaagt tcaggggttc atgtgcagga tgtgtaggtt tgttacgtag |
| 53041 | gtaaatgtgt gccatggtgg tttgctgcac agatcatcct atcacatagg tattaaaccc |
| 53101 | agcatccatt aactattctt ccgatgcgtt ccctaccctc atacgctccc cccacaacag |
| 53161 | gccccagtgt gtgttgttcc ctcccatgtg tgcatgtgtt ctcatcattc agctcccact |
| 53221 | tataagtgag aacatgcagt gtttgctttt ctgctcctgc attagtttgc tcaggatgat |
| 53281 | ggcttccagc tccatccatg tccctacaaa ggacatgatc tcgttccttt ttatggctac |
| 53341 | atagttttcc atagtgtata tgtaccacat tctctttatc cagtctatca ttgatgggca |
| 53401 | atgattttgt aatataatga tttatattcc tttgggtata tacccagtaa tgggattgca |
| 53461 | gggtcaagtg gtatttctgc ctctaggtat ttggggaatc accacactgt ctttcagaat |
| 53521 | ggttaaacta attaatactc ccacaaacag tgtaaagggt tcctttttct ccacaacacc |
| 53581 | accagcatgt gttgtttttt gacttcttaa taatagccat tctgattgga ataagatggt |
| 53641 | atctcattgt ggttttgatt ttgcatttct ctaatgatca gtgatattga gcttttattt |
| 53701 | catatgtttg tcagctgcat gtatgtcttc ttttgagagg cagaaatacc attcgaccct |
| 53761 | gcaatcccat tactgggtat atacccaaag gaatataaat cattatatta taaaatcatt |
| 53821 | gcccatcaat gatagactgg ataaagagtc tctgttcatg ttctttgccc actttttaat |
| 53881 | gggatttttt tttcttgtaa atttaagttc cttgtagact ctggatatta gacttttgtc |
| 53941 | agatggatag attgcagaag ttttctccca ttctgtaggt tgtctgttaa ctccgatgat |
| 54001 | agtttctttt gctgtgaaga agctctttag tttaattaga tcccattcgt caatctttgc |
| 54061 | ttttgttgca atcgcttttg gcgtcttcgt catgaaatct ttgcctatgc ctgtgtcctc |
| 54121 | aatggtattg cctagattat cttctaggat ttttgtagtt ttgagtttta catttaaatc |
| 54181 | tttaatccat cttgagttaa tttttgcata tgatgtaagg aaagggtcaa gtttcaattt |
| 54241 | tctgcatgtg gctagccagt tctcccagca ccatttatta aatagggagt cctttctcta |
| 54301 | ttgtttattt ttgtcaggtt tgtcaaaagt cagatggttg taggtgtgtg gctttattcc |
| 54361 | tgggttctct gttctgttcc attggtctat gtgtctcttc ttgtaccagt atcctgctgt |
| 54421 | tttggttact gttgacttgt agtatagttt gaaatcaggt agtgtgatgc ctccagcttt |
| 54481 | gtgctttttg cttaggattg tcttggctat ctgggctctt ttttgattcc atatgaattt |
| 54541 | tttaaaagtt tttctaatgc tgtgaagaat accaatggta gtttaatgga aatagcattg |
| 54601 | aatctatcaa ttactttggg cagtatggcc attttcatga tattgattct tcctatccat |
| 54661 | gagcatgaaa tgcttttcca tttgcttgtg tcctctctga attttttatc agtggtttgt |
| 54721 | acttctcctt gaagaggtct ttcacttccc ttgttagctg tattagcatc ttattctttc |
| 54781 | aagaggacag tttgttcagt ttgtttaaat tattatcacc atcacaacca ttaaaccttt |
| 54841 | attcagcaac tgaagaatgt accacaatat ctctcatttg caagacatat tctgttcatc |
| 54901 | ttctgctttc tgcttctgta gcttataaag atatataaat atattttaaa cccaatttgt |
| 54961 | aattatatat gatgggaatt gaaaacgtgg gtgattttca aataatcact aaggaataaa |
| 55021 | atatgctaaa aataaattgt gaagaattga tatgattttc taaggatggc tttactggag |
| 55081 | aaaagcagtt atcctacaat agttaatata taactatttt tatgattatt ctgttcagaa |
| 55141 | tctgaattta tattattatt tggggccttt tttaatcaag tgaagaaagg tatattttct |
| 55201 | tttcaaactt tttattttga acattcataa attacatgaa cactaaaaga cataaattat |
| 55261 | ctttcaggaa acattgaata aattctggat tcttctatat tttattgatt tgtaaaacat |
| 55321 | ctcaaattta acatagaaat gttaaaaaga gattatatta taacgtttgt tggaaaatat |
| 55381 | gctatattta taatatttat tctgtattta tatattataa atatattcta tatttatata |
| 55441 | ttataaacat attctatata tattataaac atattctata tttattaaca tttaacatta |
| 55501 | atgttaataa atatagaata tttttcaaca aactttataa tataattccc tccttcaatg |
| 55561 | aactaatttt tatggtggtt tacatttctt tttcaatgtt ggtttacatt tgacgttagg |
| 55621 | atgtttatta gttaatacaa taaagtgggt ggtcttttca ttaatattat cagtcaggtt |
| 55681 | tgtaaatagt gtatgttttg tataaccact taaaatttat atactgatat atattttgtt |
| 55741 | taagaatact taaaataaaa acattagtta tcatttgttg aactggaagg atcattactt |
| 55801 | aaaaatccat ccttaaaatt aaaatgactt atgcttcact gtgtagtgca ttgataaata |
| 55861 | tttagtctat agttttttct attgctatgt gtttagccaa gaattgtttt taatttggtg |
| 55921 | aacagtacct tattaggaat atgaaaattt ttgaagcagt catgaaatat ttaacaatta |
| 55981 | attatttaac aaacaattat gcaaaattaa ttttactaaa gaaatatttt taaatcactg |
| 56041 | caagaaatat tttcattcaa atgagtactt acaaccaaga aagagtcttt tattttttaa |
| 56101 | atgtgtataa atttaaactt caaaatactt aaatcactta atgcctcaga gaaaatatct |
| 56161 | taatacttat gaagtgttac gtgtactaag cattatgtta aattctataa agacatcttt |
| 56221 | ttaaatcatc acaagaaatt acaaggcagg tgcatctatt atatttttta tagtagaact |
| 56281 | aattgaggca cagtgagagg aaatgatgta ctcaagttcc acaggtgata agtggtacag |
| 56341 | ctgagtaaaa ttccaagtct aaaagctagt ctcttaacta ttatatatcg gcctatatgc |
| 56401 | ataggccgac aagtagttat ttaaagttat ataaatcaag agaaaacact acaaaattta |
| 56461 | cctataggat atttatacaa aatatgggca ttttattagg aaagotttct agaaatatgg |
| 56521 | gggaacttta agaaacagtg aaattcaaag ctatcattgt ccaaaagcat gtggtcttct |
| 56581 | gtttttgcac tagtgactta ggtgcaaatt acttccaaga tttttctcct aattgagaag |
| 56641 | tactttttag gtctagattc catggaggag gtgggtcttc gaggtggggc ttcaaggtgg |
| 56701 | agatagtgtc ttttttctag catgtaatga ggtaaatttg cttttgaatg aacaggtgca |
| 56761 | cctatttcaa ttaaggcaaa ttagtttcca aaggctttgc tatttaagat attatagaag |
| 56821 | gctatttaaa tgtgccaatt tacataaaat acattttgaa agattacagg aaacaatttt |
| 56881 | atataattca ctgaaacaat ttcacagtcc tctcaaatga tgattttgaa aatgacctaa |
| 56941 | atggcaggca cctctttgaa gcagctggca tgatgttatg tggtcccatg gccccttaca |
| 57001 | ttttcaggtc aatggtaaat tctccagagt ccaacttcaa ccctgcagta ttctgttcaa |
| 57061 | aattgcccct gttcagaagc ctgcatatgt aacctcttac attttgtgtt tcacaatttc |
| 57121 | cattgaactc ttcctacaca ccagaatggg caaaaatagg aatttaattt ctgggaagat |
| 57181 | ttcctctaag agcctctgtc caaaacatcc agtgctgaaa caagaaaagg tggtcctggc |
| 57241 | atatatccac tagtaatttt tttgtcttct tcttttcttt cctgttttat gtgtgaatag |
| 57301 | tgaaacttat cggttcaaag accgatgagt cagaatgctg tcattttaca tccaaacagt |
| 57361 | ggaaatttaa attgttaaaa taaaaataca caatcactaa cattaccctg atgaaataat |
| 57421 | gataagcaaa gtagtcttaa attacaggct ataagtgctg gataaagaac aatattttaa |
| 57481 | aaatatctaa agtcatataa tgaacagaag acagatttcc atttatacct gaaagactgg |
| 57541 | ttttcagaaa ttataataga acatggggat ttaaaaattg tatttggatc atttatttta |
| 57601 | cagttagaaa gtgatgtagg aaggagttcc cagaggagat gaaacagatt gaaaacagca |
| 57661 | aaattccatg acagaggtgg cttgaaatag accctttttt caaagcaata actggcctct |
| 57721 | tcatcatcta tagatagcat ttttggcaaa atcagaaaca tttgctttgc cagtcattga |
| 57781 | aggtaaaaag aaaaaaaaaa tggctgaatg cttttaaatt acatttattt aatttctgct |
| 57841 | ttcatacaaa ggcataaaat tatcagttta aattttaaaa aatattatta taaaattaca |
| 57901 | tgcttagaag tctgttgatt gttttcccac agccatttta taactgaaac cctcaatttt |
| 57961 | ggatatgaat gtataataaa cgcacatgtt cattctaaac attttctttt caaatacttt |
| 58021 | tacattcctt taggtttcct aaagaaatgt aaattccttc tgccacttag tttttgctat |
| 58081 | ttttagcagt ttcttaaagt ctgcaaattc ctttcactca gtttttgcac ttagttcata |
| 58141 | atgacttcac atttgacatt gattgtccac aaaaggggtt atttttagtt tcaaaaggtg |
| 58201 | aacgttattt gttttagaaa ttctcgcgta tatttcttag tctaaagata ggttttctaa |
| 58261 | cataaaaatg tgatagtgta gtctgtttgc tgagcacttg tagtggaaca aactcagtgc |
| 58321 | taaattcttg gtttttaata actaatttat ttattacagt aactgctaaa tatgcttcaa |
| 58381 | attataaact atttgccaaa attacagata ataatataac caaacaccat gtggatttca |
| 58441 | cctaaactag aagtaacttg gtgactttct tatttaatct tttatttatt gtacttggcc |
| 58501 | atacttattg tatgtttatg tataaaaaca taaagcaata gaagttttta cagttattat |
| 58561 | actcactgtc ttataaatgg agaaactgag acccagagaa ttttagtaac ttattcaaag |
| 58621 | ttacctagct ggtgactaga agcaaaacac aaataagacc acagattact agttttgtca |
| 58681 | agatcttcaa cataatttaa tattgcbgtc aactcagagg tctcagaaga taaggtctta |
| 58741 | ccatctgaaa acaacaaaaa agaaatttca taaaatcctg tttgtaccaa gcaatttatt |
| 58801 | tctagaatga aagcaaaatt atttttttaa agttctttag attgctgaga aatcaagagc |
| 58861 | attagggttg tgtctcccct ttaaatttac cttttagttt ctttgggttt aagtttttag |
| 58921 | atgaaatttt aaattctatt tagctctcag tttatgtgta tttaaaattt agatttagga |
| 58981 | tctattcttt ttaataaggg tgaaattaca tatggagaaa tttactgttt atagcgagtt |
| 59041 | ttgacaacta gagttgtata accaccatcc ccacagtcaa gatacatcac ttctcccctt |
| 59101 | cccaaacata ttccctggtg acactttgtg gtcatactca ttctccgcct ctagcctttt |
| 59161 | acaatgactt ctgttactcc ccctgtagat ttgcctatta aagaatgtta tataaaggaa |
| 59221 | tcacacatca tgtagcattt tgaatctggc ttgctttact tgttttaatg catttgagat |
| 59281 | ttgttcctat tgtggcagat atcagtagta gtcttctttt cattgttgga tattccatta |
| 59341 | catgaatgta caatcacatt ttatccattt gcccagctaa agaacatttg ggtgttttca |
| 59401 | gttttcatta ttatgagtaa accctccata aacatattgc atacaaattt ttatgtgaac |
| 59461 | ataagttttt gtttcaccta aacagatact atacaggact gaaattttag taagtatatg |
| 59521 | tttaactttg tgagaaactg cccaactgtt tttgcaaagt ggctgtacag atttacattt |
| 59581 | tcaacagcaa catgtgagag ttccagttgc tgcacgtcct tgtgagcact tagggttgta |
| 59641 | tttttaattt tatccactct aatgggtgtg gagtggtgtc ttattaaggt tttaataagc |
| 59701 | atttctctaa tttaatgcat tatattactt ctttttgttg gtttgtaaac tgcttatctt |
| 59761 | ctttggtgag tttgatcaaa tcatttgtcc abitttgtgt ttttgattat atttcagata |
| 59821 | caagtcttta ccagttatgt gctttgtaaa tgttttctca ctgtttatca tttgtgtgtt |
| 59881 | ttatggaaag cagaatattt cgattttctg gaaatataat ttgtcacttt aaaaattatg |
| 59941 | taaattgcta ttggtattaa gtgtaagaaa actttgcttc atctatgatc acaaatattt |
| 60001 | tcttctgaaa aaaaagctct ctgaagagtt tttttttttc aatgaatgtg ttttctttct |
| 60061 | tctctccata tgttatcttc tgaatagcta agcaatgttt acattattta ttcaggcctt |
| 60121 | tccatccact ttcacggatt ccactgaagg agaaattggg tttgaaatcc tcttttctca |
| 60181 | aaaactaatg agtcatgcat cttctcattg atattatctg gctcccctga aaacctctag |
| 60241 | tttggtccat ttttagtgat atctttctac tcaggttcct caaaccaatc tgtacctaag |
| 60301 | agacccccag attaaaattc aagttcattc ttttaacaaa ttaggtgcta attgctacaa |
| 60361 | atgcaagaaa acttcaggtg ctaatttgtt aaaagaatga acttgaactt tagtctgggg |
| 60421 | gtctcttaga tatagattga aaaggattga aaagaattat agtttctttc acttttgcca |
| 60481 | tcatacaata tgtattattt atatttcttc ttcgttaata ttcagttcac cttctttgtc |
| 60541 | catctttcta ttgaagcacc agtattcatg cagtgtttta agaatattag tccattttta |
| 60601 | tccattatgt atattgcaaa taatttcgta ctttattgtc ttttaatttg tttgcagtgt |
| 60661 | cctaagagta taaatataat agcttttcta cttttttcat tttttaatat tgcattttct |
| 60781 | ctattgtgaa tgttatgctt atgtttttct ccagctgatc tattgaggaa cagtgttttt |
| 60841 | ttaataaata taaatattgt tatagttatt tctcatttcg aagttttacg gtactaattt |
| 60901 | gtctgtctta aaacttcaaa taatacttaa ttgaaagtct ctgtctacca tcatcccttt |
| 60961 | cttaacagtt cggtgaatat cttttattat attgtgtaag gatgttgtat tgcagctcct |
| 61021 | cttgctaggc tgaacatgca gacctgttct ggaaatagat gtgatcagtt taggtcacaa |
| 61081 | cctgtcttga atcacagctg acttgtagtg gagagttcca ggaaccttcc aatcacacac |
| 61141 | aggtccctat tgctcctttt cttctagggc tattcaacaa gcagagacaa acaaaaactg |
| 61201 | atctgtcaca ttttactgca ggtaacagtg accacaaata cacctgtaca ctgttttttt |
| 61261 | tccaacatta ttgaggtgtg actgacaaat aaaaatggta tatatttaag gtatgtgatg |
| 61321 | cgatgttttg ctgtacatgt acattgtgaa atgattatca taatcatgtt aacatatcca |
| 61381 | tcacctcaca tattgttatt tttataatca cttttataaa ttttcccttc agtagtaacc |
| 61441 | ttttgagatt ctgaaacact tttgagtttt gaatgttgtg tcataagtga gtttttttgg |
| 61501 | caaatatttt ataaacatct aattgggaaa ctgtgagagg atgttttgta actttcattt |
| 61561 | aaactaagat ctcctctcca cctccaccct tcccatattc agtagatttt ctatggctgt |
| 61621 | atggtgtatc aggaatcatc ccatatactt cagaaagtaa tggaataata taaatatttt |
| 61681 | tctaacatag acctacagag attaagtgat atactcaaat cataccataa atggtagtga |
| 61741 | aagggtaaac tcaacattca cagccaactt cattatctaa tagggaacaa cacatttcat |
| 61801 | attaataatt gacttttatt tttaggaggc tctgttataa tgaaattaaa aaatgagatt |
| 61861 | agattatgtt tctcaatata tggtacaaaa atcacttaca tagaataact tcgattatta |
| 61921 | aaaatagaag tgaaaaatac ttttcagatt aaataagatt tcaattttaa ggcaaatatg |
| 61981 | ttcattttgt gctcaaaaat tagacaggaa aactataatc tgttaaaatg taggttcttg |
| 62041 | atccacccaa gaaaccatgg agaggtgggg gacagttacc tgcatttctg acagttagtt |
| 62101 | cattgactct tattcgacta aactttgaga accagtgtcc aaagtattta cttacatatt |
| 62161 | tatatttaaa agctgggata atcatgacaa tataaaataa acaattgatg ttgtatttta |
| 62221 | cttggcagat agataaagct atacaagttt cctttttcct aattctaaag cataattaga |
| 62281 | aaaaaattgt atttatttct tagatatggt aactactaaa atataatttg gaatgttcta |
| 62341 | cttaaatgag tatacttatg tatgcagtta gccgtcaata agatttagtg ttctctgaac |
| 62401 | tatttcattt ctatgaaggt ggtattaatc ttgatgataa aattttcttt taaatattga |
| 62461 | gagattctgc caaaatataa atcttactgt gacaatgttg ttgaaattcc tttcttcata |
| 62521 | tgattatttg ttctaaaata gctcccatga aagtaaaatt cctactctca agcatcctgc |
| 62581 | ttaagcatat tgtattgttg ctggtaacta aaaataaagc aaagcattag ggtggatttc |
| 62641 | agtgtaattt tatctgttta gtagagtgat acaaatgaat aaattttcaa acatacaaat |
| 62701 | tgaccaatta tttgaaagag ctatgaataa aataaataag ctaccttaaa attattttaa |
| 62761 | aattatatca caaaattttt ttcctaacaa caaaatatgt atttttaatt gttttggttc |
| 62821 | atacaaatta aaatacaaat ataattttac caaggaaagt gaagtaattt aggagtaatt |
| 62881 | aataatattt gtgttaggga acggagcata gatactatta aacctaaccg ttttatagtg |
| 62941 | catttgtttc taaatccctt aagctggtaa gtcattgatc ttgcattttt ctttgacagg |
| 63001 | cttatgcaag caaagatctg gaggagcagt tacggtctgt gtccagtgta gatgaactca |
| 63061 | tgactgtact ctacccagaa tattggaaaa tgtacaagtg tcagctaagg aaaggaggct |
| 63121 | ggcaacataa cagagaacag gccaacctca actcaaggac agaagagact ataaaatttg |
| 63181 | ctgcagcaca ttataataca gagatcttga aaagtaagta tgggaaataa aatgtatagt |
| 63241 | aagccttata tatcaaacca gtagaagttg ccagcctggt tctttaattt cagtgtttgt |
| 63301 | atcaccgaat acacctttag ggcggaaagc aaatagaaaa taaagaatta cttcaaaata |
| 63361 | caacatttta tgatttcact ttgagtatta agatgacttc ataaaataca ggatagatag |
| 63421 | gtccatgcat aaacaacaca catttatttt ttcaggtgat agccattgga aaatttttaa |
| 63481 | aacagatggc tatattttac atactatatc tgtttaataa cttaaacatt ctttatctta |
| 63541 | tcaaataatt ataccttaat ttcctatctg atttggattg agaaatgctt catttgaaat |
| 63601 | caccttttca gatgtcactt gttgctttgc tgcttcacag ataactggct cagagcggga |
| 63661 | cttaagctga tgaggtatct agcataaagc ttcacaaaaa atgatcatgt tgcataaaat |
| 63721 | gtcatagcat caattggtgg ggtatgactg ggcacagagg ttcatgtctg taatccgaga |
| 63781 | ccattgggag gccaaagtgg gaggattgct tgaagccaga gtcagagacc agcctgaaca |
| 63841 | acacagcaag acctcatctc tattaaaaaa aattaaaaag tggtggagta atttaaaaac |
| 63901 | atatttgcct tcagttggta gctcttaatc gctataaaag tttgatattg gaaagtattt |
| 63961 | tgagaacaga ggcaaacaaa atggcttcat ggttgtataa ccaatagttt atgtcctttt |
| 64021 | ccaaaaattc tattttaggg gaaatatggg ataagtaaac tagtatactt aggaagtaca |
| 64081 | ttatttgtaa tgcagaattt aaaaagtcaa cagtattata ggtaagctac taactcatca |
| 64141 | gaaacaaaat tccagaggag agttaaaagg gataggaaat attgactttg ctgaagaaag |
| 64201 | ttcagaatga gtcccagttg gtgaaaaata gccttgtatt ttatgtagct gcagccacga |
| 64261 | cattactcaa ggttgccaaa tagtccgcct gaaaaggacg tttgacttga atctaaaacc |
| 64321 | atagcbgtct tctcatatgc aactcagttt taaagaaaaa taaaattata tttatatttg |
| 64381 | cattgagagc acaaaaatgg cccatactat agagaatgaa catgactctc tctgcacatc |
| 64441 | ttataaacat tcatatatta aattaccatt ttcctaagaa agaaaaacca aacattagtg |
| 64501 | ttgtgggata ttggtgtact tttaataaag cataatgcta atttttctta ttgcctagct |
| 64561 | atagaaatga gtttaagaaa tatccttagc ttgtcttttc aatgttatat cattctcatt |
| 64621 | cacaagtcaa tttaggatcc catcagctgt ctctttagtt atatattgaa cttaaatgtt |
| 64681 | aaaatctgaa atgaatgtga gtgatttgca gctgcbgtgg gcttttttta tcttggtggt |
| 64741 | ttccgtaaaa cttactgatt tccctatgac ttgacaggta ttgataatga gtggagaaag |
| 64801 | actcaatgca tgccacggga ggtgtgtata gatgtgggga aggagtttgg agtcgcgaca |
| 64861 | aacaccttct ttaaacctcc atgtgtgtcc gtctacagat gtgggggttg ctgcaatagt |
| 64921 | gaggggctgc agtgcatgaa caccagcacg agctacctca gcaagacggt gggtattgcc |
| 64981 | cattcctgct acctgcgaga gcccccttaa tcagaagctt taactttggg gatgatgtgt |
| 65041 | ttaaacttct ggttgcttta aactaacttg gttcaactca gggtctcata ttttctttag |
| 65101 | gggaatgaag tcagtttttc agtgttttgt gtgtttgaca acacagtgtc acaaagaaag |
| 65161 | taattgatgc tttattactt tgcaaactct tcatatagtg gagtcaaagc ctcatgcaga |
| 65221 | aaacaataaa tatacgtatg tatgtgtgta catgtacgtg tgtatgtgtg tgtgttgatc |
| 65281 | ttcaagaata aacatgttca tttggcaata aaatactttt aaatgggtga gttttcagat |
| 65341 | ggtggagata acagtgcaaa cagtattcaa agtgtaaaat taaatgcgtg tgttctgtga |
| 65401 | aacagtggta tagtattgaa ataagccatc tcactgaaga aatttattgt cttcctgtcg |
| 65461 | aaagcaaagg aaataactct gacactaaat ctcagatgtt ttgaataaac tgggaagttt |
| 65521 | atctcattaa atggtaagct tctgataacc aggaaatgtc tcttaaggtt ggctttggat |
| 65581 | cagggatttt cagaccagac acataaaccc gotttgtggg cottacgtgg tagaggaggc |
| 65641 | tggcbgtgga acacgcgtat gtgctggcga taaccatgaa agtgttgttt gaaattgtgt |
| 65701 | gcacctctgg cctctgaaca gaaatgtttg gagaaatcca gtcccgtggg ctggactgaa |
| 65761 | gcaaacttct cccgaaagac aaaactgtgg ttgtcctaat gacctttcta agctattttt |
| 65821 | ggagttagac tcacacacgt aaatctggct aaattcagaa ctgttctttg acctggagaa |
| 65881 | tgaaaaatga aattgaaaga tgtggtgtta gatttgattt gtatgatgtg gtatgacaga |
| 65941 | aaattcacat tttaatttta tgcaaacttt agctgatcta catggttttc agtaataaaa |
| 66001 | cctactctta tttcaatata gtattaatag aaatcagagt taagattact atctcaattc |
| 66061 | catgaactac attttttcag ctagctgaat atttccaaaa tttttactgt tacgatcatt |
| 66121 | tggcctctga gtttggagac attgtcttat tatacaaccc aaattaattg ctttcttttc |
| 66181 | aaaaattgag tttctttata ttgctcaccc acttgataaa gaaacaagcc attttagatt |
| 66241 | aagacttgca agaagaaaca aaaaataaat tataaagcta aattttctat tcagcttgcc |
| 66301 | tctgcctcaa ctctaaaggt taaaaaaaat taaaaggtga tgctttgggg cctgctatca |
| 66361 | tttcttttag tatcatagtt agttaagctt agccagatgc aattcattct gattatttcc |
| 66421 | taaaagcaca gcaaaataat gtaggggtcg ttccaacatg tgttctcaag gaatacaatg |
| 66481 | tgactctaaa catagtcctg catttagaaa ctttaccaga aaaatgtaca gttgtaggaa |
| 66541 | catgacaata tttcagtggt tgccaaaatt ataatatttt tgatagacta acatataatt |
| 66601 | atactattgg acatagcaaa agttatcctt agttcattta tcctccctga gtctttatca |
| 66661 | aacaacaata aacaataaga cgttatagtt ttgtacttac tattctaaat aaattaatac |
| 66721 | tactttaaca ggttttattg gtattatgta ttttatcata accctgaaat caaacaggat |
| 66781 | tctttaagat cctctaaatt ttagaactgc atactttaaa ataaattaaa tagaaatact |
| 66841 | taggccaagc agatattctt tgaaaggtaa tattcatttt taaaacatat taataattaa |
| 66901 | aabittgttt ttatcttcaa gccaaacctc ttaatgggaa ttttggtata ctgagtctct |
| 66961 | tgagaaatat gtcatttcct tttaaagtta gagaaaataa atatggatga tttaggaatt |
| 67021 | gaaatataca atttttggaa tgccgttaat gatttatatt ttaaaataat tcagttaagc |
| 67081 | aatatgatgt attctagatt atattcctaa tatggtattt gatttaaatc aaatagtaaa |
| 67141 | ccaaggtact ttggatactg tttccaacta ataagataac cttctctctg ctcttcctcc |
| 67201 | ttccatttcc tttcttcata atcttttcta taaattactt tcaagcatat tttttaaaaa |
| 67261 | catagatcca aatctatggc taggcatggt ggctcacgcc tgtggtctca gctgctgagg |
| 67321 | aggcagaggc aggaggatcg ctggagccca ggagttcagg gctgcagtgt gctaggattg |
| 67381 | caccactgca ctcccagcct aggtgacaga gcatgaccct gtttcaaaaa caaaaaaacc |
| 67441 | ccacagagct gatgtcagtc tccagcataa aggcctttca gtgatttccc attgcttgta |
| 67501 | aaataagaca aaaatctttt ttgaaggtta tatttattga catatcatag ctgtacatat |
| 67561 | tttggggtca tgtgttatat gttgatacct gtacaaaatg tgtaatgatc aaatcagggt |
| 67621 | aattgggata tccatcatct caaacattta tcttttcttt ctattgggaa caatacagta |
| 67681 | cttctcttgc agctttttaa aaaatataca atatatcgtt attcactcca atttccctga |
| 67741 | tgtactattg aacactaaaa cttactcctt ctatttaact gtgcttttgt acccctcaac |
| 67801 | catcctctct ccatcctccc tacccttgcc cctcccagcc tctgataatc agtattcttc |
| 67861 | totctacttc catgagatcc actcgtttag ctcccacata aatgagaaca tgcaggattt |
| 67921 | tcaagaccac atctttatca caacctgcaa tctctgcccc atagcccctg ttcagcatca |
| 67981 | tctaatgtaa tgattcttga tcttgtgctt ccagtgctct agactttctc caattcctgg |
| 68041 | gcatcatcgt gtttcctctg ctcctgggcc cttgcacaca cacctttagg ttaacctggc |
| 68101 | cttcctgtct cctctttcct gaggtgctag ctcttcagat cttaatttgg gtgtcaagtg |
| 68161 | gctttggcaa ggcctcaggc aagactttct gacctatttg gattagaccc aatatttgta |
| 68221 | gtaaatgctt tatagtttcc catattttta aaatagtatt tattacagcc tataatcaca |
| 68281 | tagtttatag ttatgtagtc attgttactt gattaatgtc tccctcctcc acaaaggcaa |
| 68341 | aaacagatcc gttcactact tatcccagtg cctaccacag aatcagtgca caaatctctt |
| 68401 | ttagtatcac ataaaaactg tggacccttt catgagaaca aatgaaaata tagacacatc |
| 68461 | cacagcattt ccccccacag ttttagggag tttgttccct gacccctagc cttttccctt |
| 68521 | taaaccaggc tttaaaactg ctgccttgaa gattattaat aataaaatag ctgattaaca |
| 68581 | cacttgtgga attttcaaat aattggtctt tttgctaaac aaacgtttat gctatcaatt |
| 68641 | tagcttgatc ttttaaaaaa tatctgtttc tggagaggaa cagaaaaggt aactattggg |
| 68701 | tactgggctt aattcctggg tgatgaaata atctgtgcaa caacccccat gacatgagtt |
| 68761 | tacctatgtc acaaacctgc acatgcaccc ccaaacctaa aataaaagtt tacctattta |
| 68821 | acaaacctgc acatggaccc ccaaacctaa aataaaagtt tacctatgta acaaacctgc |
| 68881 | acatggaccc ccaaacctaa aataaaaccc caaacctaaa ataaaagttt atgtcacaaa |
| 68941 | cctgcacatg cacccccaaa cctaaaataa aaccccaaac ctaaaataaa agtttaccta |
| 69001 | tgtcacaaac ctgcacatgc acccccaaac ctaaaataaa agtttacctg tgtcgcaaat |
| 69061 | ctgcatatgc accgcgaaac ctaaaataaa agtttaccta tgtcacaaat ctgcacatgg |
| 69121 | acccccaaac ctaaaataaa agtttaccta tgtcacaaac ctgcacatgg acccccaaac |
| 69181 | ctaaaataaa accccaaact taaaataaaa gtttacctat gtcacaaacc tgcacatgga |
| 69241 | cccacaaacc tgcacatgga cccccaaacc taaaataaaa ccccaaacct aaaataaaag |
| 69301 | tttacctatg tcacaaacct gcacatgcac ccccaaacct aaaataaaag tttacgtatg |
| 69361 | taacaaacct gcacatggac ccccaaacct aaatataaac tttatatatg tatgtatata |
| 69421 | tatacatatg tatatacaga tatacatata tgtatctgta aaagaaacat atctatctat |
| 69481 | atctatatct agatatccag atgactagat gagatataga tatctgtttc tcttacagat |
| 69541 | aaggaagaaa attcttcttt attctctcat tcattagtta atatgagcaa aagccaacat |
| 69601 | tatatctttc ttactattgg tcaaccaaat aaatgcatac tttacatatg ggccaaatag |
| 69661 | atacctaagc ataccttagg taaaatctaa acttggaaaa cagaaaatca gtacattgtt |
| 69721 | agtaagcaaa gtaaataaat ttagtcttct attaaccatt tgagtttttt ctgtgaccat |
| 69781 | tgcatattca ttttctgcat tggtctaatt aggtgtcaca ttcacccagt gggtattgga |
| 69841 | gtgaaagtat ttattcaagg gtaggtgtgt atgctcagta gcataaaaat tgctctatca |
| 69901 | agagggaggt gttggagagg tttaggcttt agaaattgca aggcttcgct gggcactgtg |
| 69961 | gcttacacct gtaatcccag cactttggga tgccaagaca ggcagatctc ttgagcttag |
| 70021 | gaattggaga ccagcctggg caacatagtg aaaccctgtc tccccaaaaa agtataaaaa |
| 70081 | ttagccaggc atggtgttgt gcacctgtgg tcccagctac gcgggaggta gctgaggtgg |
| 70141 | gaggattgct ggatcctgga aggcagaggc tgcagtgagt aaagatcgca gcactgcact |
| 70201 | ccagcctggg tgacagagcc agaccctgcc tcaaaaaaaa aaaaaacaaa aaaaaaacaa |
| 70261 | aagaaaaaaa ttacaagggg ccaggggtaa gatgagcatt tagtgctaag tgtaagctgc |
| 70321 | atataggtga aataattttg cccagtctac ttagtactta aacatcagat atttgctata |
| 70381 | agaaaattgt ctactttaga tcacatggaa tcttttcttg ctgtatttca tctctttcac |
| 70441 | ctcccagctt tgcagaattt aggcttactt ttataataga tttacaatgt tgatatgagt |
| 70501 | tttgtcaact tcttcccaat catttgcttg tgtgaaaaat caggacttgc ccatgaaatt |
| 70561 | tctgaagttt gtctgctttt ttgttattgg ttgatttttt tttcagtttt ttttctatcc |
| 70621 | tattggtggg ctatatattt acaataatca caatatttat acattctgat ctgtaatgca |
| 70681 | gtcatatttt aaaatttata tagcattagt ttttattttg tcattttaat tttttaaaga |
| 70741 | tttgaagatt ttgagaatta aaaatttgta gttcatcaaa aatatggtat ttctcctgag |
| 70801 | aattctgacc taagacacct tctctgcaga ctgtaactct ccttgtattt tctcatctac |
| 70861 | ttttttttac ttttcccaaa cctttccctc caattcaggc ttctttcctg atttctatac |
| 70921 | tgtccactca accttgtgac ttggctgtcc ctcagacagg tcagtctgtc tcacttaaca |
| 70981 | gttagaacct attccctacc accttgccca aataagcaag taagtgaatc ctattctttt |
| 71041 | tccagtgttc bitgtcttag taaatgacat catcattcag ccagtoggtc aagccaagtt |
| 71101 | attcttcctt tcaccaaaac taattgctat tcaatctacc ttgcaaacat ctctaggacc |
| 71161 | tatccagtgt ctccacgctg ctaatcccgc tctgatctag gtcacattta ccccttacct |
| 71221 | agaccattcc tcttggacaa gcctaataac tggtctccta cctccattct tcctttcctc |
| 71281 | caatctattt gccacttttt agcagtgatt tttttttctt ttcttaatgc taagtcagat |
| 71341 | actgctaaaa actccttgat aacattgcct tattgggatg gagccagcat tcaactagtg |
| 71401 | tggtgataag cttatctttt ctaattgggt tgcttaggcc agcatctggt cagattgatt |
| 71461 | ggtacaaatg ttctaagttg ttagtgtttt gaatggaact cttctttcag acaaaatccc |
| 71521 | ttaaacataa tttcctgggc cctcaatgat ctggatgcta cctaagtgtc cagcctcaaa |
| 71581 | tgtcaatgct tttccccaca aacactactt accactaaga cccaaattct tttcacttct |
| 71641 | tgggttatgt caatatctgt cacctccagt attgcaatgc tgtactctgt gtttgaaaca |
| 71701 | tctccctaca catgatcccg tatctcgatg tatctagtta atgtctactc atccttaggc |
| 71761 | ctaaacataa atgtgacttc caggacattc bittatgtgc ttccacagca tccattgttg |
| 71821 | ctgtatctta gcatcattac cttatctgtc agattgtttt atctttgttt aattccctag |
| 71881 | gttttttttt tttttttttt tttagatgga gtctcactct tgttgcccag gtgggggagt |
| 71941 | gcagtggcag gaactcagct cactgtgacc tctgcctcct gggttcaagt gattatcttg |
| 72001 | cctcagcctc ccaagtagct gggattgcag gtgtgcacca ccacacctgg ctaatttttt |
| 72061 | gtatttgtag tagagatggg gtttcaccat gttagccagg ctggtctaga aactcctgac |
| 72121 | ctcaggtgat cctcccacct ctgcctccca aagtgctggg attacaggtg tgagccactg |
| 72181 | cacccagtct tattccatag gttctagact ccatgaaaac aaagattgcg tctgcttgtt |
| 72241 | acactgaaca atagcacagt agttggcaca tagcaaacac ttagaagtga ataaaatgaa |
| 72301 | tatttgaata aaaagaaaca aatttggggt caaaggtcaa attttgaata tgctgatttg |
| 72361 | aaagagtctg aatggtgttt aggtggagat accagaaggt ttgatgtaca attctaaaat |
| 72421 | tttagaacaa taactgggtc tttaaatata gatttgggag gaagcatcat tctgataaat |
| 72481 | gtcatttgaa gcctggtgtg cttattaatt cttagggtat tgatgtatca caagagaaga |
| 72541 | gcaaacatca gtaccaaggg aaagccaaca ttcatcatta gcbgtgccct gcatttccct |
| 72601 | ctttgatttt gtattatcat gcccttttcc tatccaaagg attcgcttat atttttgttt |
| 72661 | atagtataag gaattttttt ttttttgaaa cggagtctca ctcttgtcac ccaggctgga |
| 72721 | gtgcaatggt gtgatcttgg ctcactgcaa cctccacctc ctgggttcaa gcgattctcc |
| 72781 | tgcctcagcc tcccgagtag ctgggattac aggtgtccac caccacgccc agctgatttt |
| 72841 | gtattttaat agagataggt tttcaccacg ttggccaggc tggtctcgaa ctcctgactt |
| 72901 | caagtgatcc actcgcctcg gccacccaat gtgctgggat tacaggcatg agccaccgca |
| 72961 | ccojgcagat agttttaatt taaattcagt tagacaagtg catgtggtac acccattatg |
| 73021 | tgacgcttca tattatgtac taaaagcatg ctatgcacaa agtgtaggtg tacagtgatg |
| 73081 | gatagatcct gccctatgga actaacaaat tagcaagcga aatcaacatt tatcaagtaa |
| 73141 | ttaaaagtag tttaagtgtt gtgaaggaaa agtacaaagg cttatggaag tgcatatcca |
| 73201 | ggatgtttat aaaccaaggg aggtcgaggc ataaaatttc tgaaagcaag aatgcagtgt |
| 73261 | tcctacattt ttactaatat tccaagttct gaaaacgtgt acttaagtag cagcttttcc |
| 73321 | tgagtttatt caatttattg cattatcagt gtagtatgaa tgggagtgtg tgatgatttc |
| 73381 | cttcaaatat aaaaggaaat ttcttaatgc gttgttttct taaggtaaaa aaaaacaaaa |
| 73441 | aaaagacttt toittttgtt aaaagagttc caggcacatt ttgtagcaaa gccaccaatt |
| 73501 | ggcatgatgt aaattgtaag gacaatgtac cttaggtaat gttaaactca agttttttat |
| 73561 | agatacttca tagaaatgct tttttaaaat gggactcaat gaaggggagg ttatcagggc |
| 73621 | gtgtgaggaa gccagcbgtt cattgaaaag taaaagcata tgcactgtgc attccaaagt |
| 73681 | atactaatgg ataaaaactg cttcaaagtt ctccacacaa gtatctaagt ggctttgaaa |
| 73741 | agttaagtag attggatgtc ttttcaacct ctttcataaa catacacttt gagtatattt |
| 73801 | tcttatgaga agttgtatgt ttaagagata taaccaaaaa gtagaaaatg aattttgcag |
| 73861 | ggggtaaatt atttggtgat gaaagcagaa gcagaagaaa gtcatctgct tttgaggcac |
| 73921 | acatttggat taaaagttac ttgaatgtta gtatttacct tatatatttt actaaatcta |
| 73981 | ggaaagaata aagaaaaaca gctcaatctc tagagtcttc ctgaaaatgg tggggttaaa |
| 74041 | tcaagctcaa ggaactagaa gttctttgct gtgttcatta gtgccagact aaagaagcca |
| 74101 | gtttagttaa gaagctagct tgctatgagc taattctgat acatagaagc agcattattt |
| 74161 | taaattctac attgccatct taaaaacaag cagctacttc tttttcatta ttttataaag |
| 74221 | caataatatg agcaatcaat aatatgagca tgtatattaa caaagacatg ctcgattata |
| 74281 | tttaagttgg atgtttcata aaattttaca acaaaaaata tttaaaccta agtaaaatat |
| 74341 | gcaactatat aatgaaatta gaggtattat tttgcactgc agtcagagat atttcttcca |
| 74401 | ttaattaaac agaatactgc agcagtctgg aagattaatt tattacattc ctttgtattc |
| 74461 | agcaagtgga acgtgatttg tattgtatct ttagcaagtt aatatttggc aagcacagtt |
| 74521 | tttggaaatc aggttttatc ctgatgtgga aaaagaactc tatgccagta ccagttatca |
| 74581 | gaactttctt taagaataac atttgcctta agaacataat taatgcatct gtgaaaaata |
| 74641 | ccactttttt ccaacccaag gtacaatgag attcacgtat tttattcagt atttctaaaa |
| 74701 | ctcttcaatt gaggttttta ttttaattgt ggtactgtgt atacttttta tgcataacaa |
| 74761 | tatgttaaaa ttaattcagt accagattta aatctgttag gctatctgtt attccatttt |
| 74821 | ctttcccaaa cccaatttaa gttccacagg ccttttatag ctggccatgt ggttgcaatg |
| 74881 | ctaagtcaaa atgctaagac cttttcccat tttggggcat tatttcttta aattcgttgt |
| 74941 | agttttaaaa tctgatttta tagttattaa tcatattctt ctgggggtac atatatctgt |
| 75001 | acttaatgga ctaaagtttg gaatatttaa atttaaatta aatatggtag tgagatttgt |
| 75061 | tctgaagaga aactggttat atttaggata taatggtgtt ttaaaggaag gcattttttg |
| 75121 | tgtcatattt gtatccacac aaacattact tataatttag tactaaatta taactcaaga |
| 75181 | tcctctcagt aaggaagttc tacacctttt tcttgaatag ccagcaagat aagtacgatt |
| 75241 | aggaattgtt gctttatagc cgttgctatg ctgctgtaaa caacctattg tttcaaaatg |
| 75301 | tggctttatt tgaagtccat tctbittggt gagaattgac tattaaatat tcctattaaa |
| 75361 | gaatgccagt agattacaac tgggaacctc tcagttggaa acacttgcca tttcctcttg |
| 75421 | tttattatag ttttacagaa tatacagtca gatttttttt tcagtttcca accttgctta |
| 75481 | aatgcctttt tttatatgtc cttttgatct tctccaaaac caacaactgg tattatatgc |
| 75541 | ctaaagtata tgtcaggctt cataatgaat tgtattatta caactttttt tgtgtcctac |
| 75601 | attggacaca agttaatatt acttattggt tcagaacaat tcactttatt gtataaaact |
| 75661 | gttttagaaa aatcataatt ttcaaaatat caaattataa tagatacatt atcagttaaa |
| 75721 | tacatcatca atcagtattt actaaataaa catacttgga gctattagct agtgctgaat |
| 75781 | aatacataaa ttttatgtgc tatgaactta aatgtagaac agaaaatact attatataca |
| 75841 | caataaagca caaaatagtc tgacaatagt atcatgattc atattttctt aaaataatct |
| 75901 | acttactgtt tcaaacattg atatgtttgg atagatctaa actcttttga gaggaaattc |
| 75961 | tagttactat gttagttcag atcattatta atggcaagaa caaattgcat aagggaatta |
| 76021 | aactccagtg tttacggtaa gctatttggt atttcagaaa ttctaccata gtatctctct |
| 76081 | ctgtgtatat gtatgttctc attcaccctc accgtgaggt ctcttttttt ttctttttct |
| 76141 | tttttttttt tttttttttt tcggagaggg agtccacctc tgttggccag gctggagtgc |
| 76201 | aggtgcagtg gtgcaatctg ggctcactgc aacctctgcc tccojggttc aagaaactct |
| 76261 | cctgcctcag cctcccaagt agcbjggatt acaggcatcc gccacgccac ccagctaatt |
| 76321 | ttagtatttt tagtagaaac gggatttcac cabittgggc cggcbggtct tgaactcctg |
| 76381 | acctcaagtg atcctcccac ctcagcctcc caaagtgctg gggttacagg cgtgagtcac |
| 76441 | catgccccgc cctcattgtt aggtttctga tcagcataga ggcaaggtca ttactgatga |
| 76501 | ctgttatcct gagattctag caaggtgctt ggtatcatgt aggtactgaa taaatagtta |
| 76561 | ctgaaaacta aacaaggaaa gattttaaat aaaaatttta aaatttagaa tttctttaac |
| 76621 | aaaaatttaa ctaaatcttg gctgatgtga atgatgataa agaacaagag aaagaagagg |
| 76681 | aggaagagaa atccaaacat tacactgaaa tcaccattat tattatccct attttatagg |
| 76741 | taatgaaatg gaggcttggg gaagttaggt aatttttcca agtctcagaa gtagtaaatt |
| 76801 | gaagatccag gactctaatt actgtctgtt tctcaagact aagtaaactc ttgtttattc |
| 76861 | ttacatactt cgtggagtag ggaagttgcc agtgatttga aaatgttatg tatttatttt |
| 76921 | gggagggcgc catgcaagtt tataatgcac ttctaattat tattttttca gttcaaaaaa |
| 76981 | tgtatatttt ctaagcacat actatctagg aaaaaaagct tacggaaatt cttagtaacg |
| 77041 | tagggattaa atatagctat gtaaaaattc acaaagtggt ctgtaaacaa gaaaatagaa |
| 77101 | tttactatat ttattgaaaa ggcagtagaa actgtaatca tgtctaactg ataagagtaa |
| 77161 | gtcagtcaat atacacacat gagaccagca cagaaagaat tagaaaaatt aaagaggcct |
| 77221 | ctttagtatg tgacaagagc tggtataggt acaattatat cttaatacat acccagatgg |
| 77281 | catattccca gtagatatta ctaattttcc tgaagttgat agataaataa aactcaatta |
| 77341 | tcaagactct ttctactttt aatattatca aaggtatctt tctctggact cttaaaattt |
| 77401 | tttcacactg gtatcatcaa gtagcaggtc aaaatttagg gatagaggat gtgtttcaag |
| 77461 | agaagaacaa aattttttaa ctttaatttt tcaatctctg ttccttttga caaaattaac |
| 77521 | tgaattcagc ctgccaattg ctacttagac acaaaaaaga gaaatgagac attagttatt |
| 77581 | aagattttga ttttgattcc tttatgttgt gatttccttt atttccttta agtagttaaa |
| 77641 | ctgcaacaaa gatttttttc tctccaactg taaaaaagtc ttccatttta ccacttataa |
| 77701 | aagtcttcaa cttagaggaa aagacagttc tctaaacagt gatttggttt tagtgctgtt |
| 77761 | ttacctgtct ccttattctt ttagtcagtg tattcaaaaa cacatttctt gcagcctttg |
| 77821 | aaagcataga gccacactta gttttccagg aagatgcttt cttaatgtga attagctatt |
| 77881 | cttcatctca ccagaacatt cttcaaagct gctgttcctg aattcatgct tgatacccat |
| 77941 | gggtggatcc tgatttgtga acattatcta cctaggcatg gatgaggtct ctccatgatc |
| 78001 | actgatactg ctcacggcaa tctgtctacc atttggaaaa caggccgggg cagaatctgg |
| 78061 | aagggcagcc atcagtggga gcaggaatga tgctgccaag ggttaggggt gggaaaacat |
| 78121 | aaactcttct acaatagctg ttagttatct caaatagtgc cttaccttca ctatcaggct |
| 78181 | ctgtcctgcc tggtttcact ggagacaatg ccaaatcctg ctgtgcttac ttattacttt |
| 78241 | gtttttgcat tgctataaag gaatacctaa gactgggtag tttataaaga aaataggctt |
| 78301 | aattggctta tggttctgca ggctgtacag gaagcatgat gctggcattt gctcaccttc |
| 78361 | tggtgatgcc tcaggaagct tgcaatcttg gtggaagggg gcgcbggtgt gtcatatggc |
| 78421 | cagagtgtga gcaagagagg gaagggagag gtctcagact cctttaaaca accagctcta |
| 78481 | gcatgaacta acaggaaaat ctcacttctt accgaaggat ggtgctaagc cattcatgag |
| 78541 | ggatctggtc ccatgaccca ttcatctccc gccagctccc acctctaaca ttgggaatca |
| 78601 | catttcaaca tgagatttgg aggagacaca gatccaaacc atatcagatt acaaacactg |
| 78661 | tgcgtgtaag caaaattgtt tctgcbggtc tgagccactt gagccctttc ccactagtca |
| 78721 | catggagcac ctcttcttgt cccccgtctc cactgctgct tccttcctac agcccctgcc |
| 78781 | ctgccacagc ccttggaacc acatcgggtg ctggttatct cctgtcaatt cttgttacat |
| 78841 | ttgacttccc gaagacatgt ggccctgtga ccacacacac ctgtttgaag ctctcccctc |
| 78901 | tttctctggc acccgttggc ttgacagtct cccctcctga tgctccatca ttgttatgct |
| 78961 | tcttcccaga catattcact agttcctttg cctcttccca cctcatagat gttcctgtgc |
| 79021 | cccaggtttc tattcttaga cattttctct tttcatttag agtgctcatc aagtaatctc |
| 79081 | atcaatgtcc aagactccaa ttacagctta aatgttcatg acttttcaat ggctctccta |
| 79141 | aactctagac acacatatgt gactgcctac tagacctaaa ttcttaggta caccttccta |
| 79201 | ccatctacat tattgcagag cttaaataat caaattataa attatacaaa tataaaaaat |
| 79261 | aagtaatttt ataaatttat taaaaattgc tttttaaaac cactttgtat gtcttctgta |
| 79321 | gtgctagttc ttaatataga ttccatagat gtcttaaaag atagaaaaat tgtagcttat |
| 79381 | gaagacactg cagaattctc tcttaaaata ggtatatata gtgcaaagga ttactgccat |
| 79441 | tgcaatattt cacctaatca aagattttat ccaacgtgta taaacgggta tctttttaga |
| 79501 | taagaaactg gtcaaaatca taatagtggc atatgttgag gtcacatagt gaagttatct |
| 79561 | atgcagatca gacagtattg tggagaatac ctagaatctt gagaatttac acaaatagta |
| 79621 | ataacttaga tctgtatagc aaataatata catatcagat tcatttagtt tatgtaatct |
| 79681 | ttataatctg agaataatga gtcaagtgtt atccttagtt tactgattat caaagaaaaa |
| 79741 | tacagcttgg agaagtcaaa tgaattttcc aaatttatgc tacttataaa tgggagagct |
| 79801 | aataaaagcc acctgtctgg gtataaccct gtacctattt cttctaaagc atattgtttt |
| 79861 | ctaaagaaag tagttacatt ttaaatgaat atataaggaa tacatcttga atgaagacaa |
| 79921 | tatgcatttt ataatttaca tatttctgta tttcattatt cagaattcat ttaaaaagtc |
| 79981 | tccttgttgg catggacaaa attggcagct aatcctatcc cataaatatt ttcaatggtc |
| 80041 | ttcagctgat ggcgtgaaag ttcagcaaag gccaagtcac aatgctttga agtttgtcat |
| 80101 | cttttttatc actgctcaga ttgtcatgaa gacaccaagt aatacatgga tcaattatag |
| 80161 | ttaaatgact gcaagttgat cttatcaagc agttagtggg caagatttca cttttaccat |
| 80221 | tttttctggt aatgatttag agtgtaagaa cactaggaat ttaaatctac ttagttttac |
| 80281 | ttaatcaatg atgtatttgt ttatttaatt taaaacattg tttttggaga aggaagagaa |
| 80341 | cacaagaagt tcttgatcca taaataaggc gttcagaagg agaccagtta aactaaattt |
| 80401 | tgactgtaat tcagaattgt gtaaaatgcc ctactttatt ttaagctcat tattttcata |
| 80461 | attcctttac caagatagca gaaacatggc tttatctatt aaattataaa tgtagttttt |
| 80521 | tttgttttaa acataatcaa tttataagag atctaagaca tataaaacta cattgaggta |
| 80581 | gaaatttaat aaaaattaac tttacatcta tgtaacttac gtctatgtat tcagtttatt |
| 80641 | taaagtaggt cataaccaag tatttctggg ttgtgtggcc aatagctttg ctcctaaatc |
| 80701 | acaaagatgt ttctgtgtgt gacacttttt aaatccctgg aatattttaa atgttcattt |
| 80761 | caaataatct ataactttga aacagttctt ttttcttgaa cacattgttc tgtcacgtct |
| 80821 | aataggataa ccaattagtt ggttatccta attctaatat gcttcataac tagtgacata |
| 80881 | agataaacat atggagtatt tattactctg ataaaagata ctggttagga gcaagacagt |
| 80941 | ttttactttg taatcataaa aacatagcgt cctgcgtaca ctaggcagct acttatatag |
| 81001 | agctaatctc actctttttc ggactccaat atttaccata aaagtgcttt acagcatcta |
| 81061 | tataattttt tcttcttttt gtcccttctt tgtagttatt tgaaattaca gtgcctctct |
| 81121 | ctcaaggccc caaaccagta acaatcagtt ttgccaatca cacttcctgc cgatgcatgt |
| 81181 | ctaaactgga tgtttacaga caagttcatt ccattattag acgttccctg ccagcaacac |
| 81241 | taccacagtg agtatgaatt aaatctattt tttctgcatc ctctactaat attaaattat |
| 81301 | tttcaagtaa acataagtta aacaaataac ctctgtgaaa tttactgtaa tatactctgc |
| 81361 | ttcaaataca aaacaaagac aaaattttgt atagtataca atgaaaataa actgaaaatt |
| 81421 | aaaattcagt gggaagcgta ttttagaggc aaagtaattc acaatataaa agaagtatgt |
| 81481 | ctgtgaaata aaacacattc caccagtgtt cataaaatat cagtaaggta gcttaattga |
| 81541 | tttaacattc ctgaaatcag gtatgctaac tcataaatca tattaaagtt caaaacattt |
| 81601 | cagccttgat aagattttag gccaaaacaa aaagtaaata taaataattt tatatctatt |
| 81661 | agcattcagt tgctttcttc aatctcaaac ataaaaatat atatgbitgt gtgtgtatat |
| 81721 | gtgtatatat gtatctccat gtttcttatt tcagcaatat ttgaatagtg aaatagtgct |
| 81781 | taattacttg aaaaaaattt ctgttaatat catttcaaat tgacattcaa accattattt |
| 81841 | gttattcagg tttcctttcc atcctatttt tttggagggg caaatggcag catatacctc |
| 81901 | atgtgatcat ataggagaac ttatcacgtt ctcctgtatg atcatgttct gaccctgtga |
| 81961 | atagctgata atgaattaat atgcattact gcctaagatc tgagagtttt ctgccccaaa |
| 82021 | gtagggatgc aaccctttgt tccttaggat atccggtgca tatggatgaa acttacataa |
| 82081 | ctctagcatt tgtaacaaat gtataaataa attgatcaaa atacatatat attacaaaaa |
| 82141 | agaaaacctt acatttttaa aagactcaac aataaatgta atatgcaaac catggttttc |
| 82201 | cccactgaat cacgttgtac tactctgctt agtgtggcag atagggggac cccttgtttg |
| 82261 | tccagggaca gtttaggaaa acctggaaga tagcctaatt tgagtgacag agatctgtcc |
| 82321 | ccttttatgt gagaaagcaa agatcttaca gacatttgtg aataaatgta tgctaataca |
| 82381 | agcaagagac cactaccatc tgaactcaag aggatgccgt atgtgcaatt tcatccccgc |
| 82441 | aggctagaga gttctgttca ccttcctcag ccctgagcag aagccctcag tgactcctcc |
| 82501 | attctgagag ctttagccat tatctccata ctcatggctt ccaaaatgac atttgaagat |
| 82561 | ctaaccatat ttttgactta taatatttta tctaaatcta tcttctattg ctttgcttgt |
| 82621 | aattatatta gctgtaagta caaagagaaa gacttgttaa atcctttatt tctacattat |
| 82681 | tcatggcagt gttttctcat tttctttgag gccttgaaat cacagagttg tcattacttc |
| 82741 | ttcttcttct tctatcccat ctaaacacaa ttgattattt tggaggaggg ggagatatgt |
| 82801 | gttccaagct aaacttatat ttcatttcca tcactgccat tatcatccac ttcattatgc |
| 82861 | atgtctctga tctaatgcag tgatattaat actagttttc aagcatcaag tctttctcct |
| 82921 | gttgtataat gtcactgttt tatgaagtaa gctttaaaag gcatcgtttc attcatctca |
| 82981 | ccagaaacag tgactttcag ttgctcaaag aactgagcac aaatttctca ccaccctatt |
| 83041 | ctggtgtcag ccttcctttc ttgttttgtc ttccattatt cacccagtct gtgtttcacc |
| 83101 | aagtccgatt cccagaacgc caagctcatt tcctgctctg tatcttgttt ctattctggc |
| 83161 | cctggcttgt gttctgcctt tccaaagccc tctccatttc tcagagttca ggtaaaggtc |
| 83221 | tttctcctgc atttgtcttg tccgaatacc acggccaact ttgcttcttg aatacccata |
| 83281 | gcactcactg gattaacttc atcctcacat ggctttatca gggtctgcaa atgttgcatg |
| 83341 | tggaactgga ttatgagagt gtttccagta agtttatatt gtctgcaaca ttcagctaac |
| 83401 | aacactcaaa aatacttgag ccattcctgt gctctcagcc cctttacctg cattgtctga |
| 83461 | tttaaccctt aacaaaatca tctagaaggt cagcagcagc atttgcctta ttttacagat |
| 83521 | aaaggtggaa atcacactcc aaagcbgttg gctaaataat gtacataaat gcttgttaaa |
| 83581 | taaaatgact catttcctgg atgtatttta tagcatttgc catgttttca tcattactta |
| 83641 | ttcatataac tactatccta tacactgttt gaggtcaaga agagacagga agctacagca |
| 83701 | aaaagagcct gagtcttaga gtaagccata cctgattctg aattcagatt tgccactaat |
| 83761 | tcattctctg tgatcaggta ggtgttttat gtctctgaaa ctcagtttac ttatatataa |
| 83821 | actgtaaaga tgtaaagagg attgaatgaa gtactgaatg cttatgcaat gcttagcaga |
| 83881 | gtgtctggta tccagaaggt agtcattaaa gggcaaattt attattacca ttaatatcta |
| 83941 | agtctgattc atttcctcac ccatgtgttt ttcagtattt ttaaaaccac tatctacagt |
| 84001 | aagaaaaaca ttttatattc caaaccagga tgtgtggtat acacacacat agtgtgtctc |
| 84061 | tgtgtatata tatatgtcga tattagagaa ttttaaatta gctagataac ttcacatgta |
| 84121 | attaattatg tataagcata aaactaaaac aaattaccat ttaaaaatat tgtccttaat |
| 84181 | tatggtgctg ctcaagcttt ctcattatca caaccccaag gatcctttta taaacatttt |
| 84241 | ttccctaatc actttcccca taaaatttta atgtaacaaa tatactctgt ctttatacta |
| 84301 | tatgtatctc tgtgctttat acataaaaag gaagtgtaaa gtttactttt ttgttcaatg |
| 84361 | tagtgttaaa taacaaataa aatgtttaag ttaacattta aattaaaaat ttttaatctc |
| 84421 | ttaacagcta acataaattt ataattgtat ttgccaggaa acttttaagg taatctgttt |
| 84481 | acttatataa attgtaatat atcaaattac atatgcaaag taacaattga tatgaatata |
| 84541 | taatacaaat ataataattt ataaaaacat tcaaaatcac tatttttcca gcaaaagtaa |
| 84601 | aataattttt aaaataactt ctttaaaaat atttggagag cttaactatt aactttgctc |
| 84661 | agtatgagaa aacttttaac ttatatagat gataaatatt aatttagata ttgtcaactt |
| 84721 | tttcttttca tcatttgaca tgtaatggta tgactaacat ttgtagaatt aataataaaa |
| 84781 | tataaattat tattatttaa ttctcaaagc tcaagtcaca catgaaaaca ccaaggacca |
| 84841 | agcataagca atatccacag ggcaaccaat ggcagccaat aggcccacat aggtaccact |
| 84901 | cagtatatgt ttgaaatcac tcagtcaatt aagagaaaat cctccagtca tagccatcta |
| 84961 | gtcaccataa tttcatagct catatattgc aaacacttgg ggtgtgttcc gttgccaatg |
| 85021 | ctgttcatgt aatggccaat aaaaccaaat agaatttaag tattaaggaa tattattttc |
| 85081 | ttgggttttg gagagccaaa aatcattgag atattaagat tttagcccca tccaggcctc |
| 85141 | atacccaatt tttaccccct tagagatgat tttactccct ttatgaatat ttgccttatt |
| 85201 | attacgtgtg atatacccaa ataatttttc tattctgttt ttctttgtga aaatattggt |
| 85261 | ctcaaccctt tatgaattat ggcccacaat tcaataaaag ctacactagt gataatatat |
| 85321 | atatgatgga catgtgacta tgttataaaa ttctaacatt tgttaagatt taagaggaac |
| 85381 | aatcaccacc acggtggcta aaattaaaaa cactgacaaa aacaagtgtt agaatgtggt |
| 85441 | gcaaccaaaa ctcctatgtc accaatgggc attaaaattg ttcaatcatt tttcaaaaca |
| 85501 | gttgacagtt tcttatgaat ttaacatgta catatttcca cacaataact tgtgtacaaa |
| 85561 | tgttctttat tagtcaataa ctggaaacaa ctcaaatgcc catgaaagat gagtggatta |
| 85621 | acacatctta gtatatgcat acagtggaac attgctgagc aatgtaaaaa gaatgaacta |
| 85681 | ctgatacaca caagaacata aaaggatctc agagacatta agttgagtga aataagcttg |
| 85741 | gctaaaaaga gtacattctc tatgatttga tttacatgag gcccttaaaa gacgcaaatg |
| 85801 | tactctagag tgagagaacg caattcagtg tttgtttgag gatttggatc aggattgact |
| 85861 | gacaatgggc aagagagaca ttgtgaggtg ttagaaacat tctttatttt gattgtgaca |
| 85921 | gtagttaatg tggatacata aacttacgaa aagatgataa attcaaaata ggagcatgtt |
| 85981 | attgtatgca aattattccc caataaaatt gatttttgaa aagcctagaa aagaattcct |
| 86041 | ttattaagta caatttttta agtagcttag gtttcaaata gtagatttct cttttttttt |
| 86101 | tttttttttt tttttttttt gagacagatt ctcactctat cacccaggct ggagtacaat |
| 86161 | gacgtgatct cagctcactg caacctcctc ctcctgggtt caagcaattc tctgcctcat |
| 86221 | cctcccgagt agctgtgatt acagttgccc gccaccatgc ctggttaatt tttgtatttt |
| 86281 | tagtagagat ggggtttcac cattctggcc aggctggtct tgaactcctg accttgtgat |
| 86341 | ctacccgcct cggcctccca aagtgctggg attgcaggca tgagccacca cgcccagcca |
| 86401 | aaatagtaga ttttttaaaa cctttacaat aacattttaa gtcaaatctt tgattaggga |
| 86461 | gggagatttc ccacagtcat ccaaaaacta tacgttgagt cactaagata aagaatgctt |
| 86521 | ctagatccta ttagagaaaa caaagatgcg cttggctggc tctgaactta gagcacttat |
| 86581 | agtcaagtaa gaacaacaca tattatagtt acattattat tgttttattt tactaaatat |
| 86641 | tacaaagcac caagcatctg ccacacattg tctcatgttc atacaaatac tgccggtggc |
| 86701 | tccattcgta atacacatca catagtacaa ggctgaagag tgtggatgct gtagggagct |
| 86761 | tccagttttg agaatttagt ctctgatttc tctttgagtt tgagtaggtt ctgtaaactt |
| 86821 | tcttgtgaca catttttttt aatctacaaa agagcacata agtaagaatg ttacatataa |
| 86881 | catcatacag aatatttata agctaatctt cactgaaatc aatctgttca atagcattat |
| 86941 | accatatttg acataccata gccatgttaa tctgatattg tagaatagca tagtataata |
| 87001 | ataataactc ctaactcaag gabittgtga tctttataac cagcaatcca tgttaaatat |
| 87061 | tagcacagtg cctaaaacat attaagcatt caataaatga tcgctactat ttttactaac |
| 87121 | atcctacaga tttggaaatt gagtcttaga aatgttaatg tgtaaaatgc taaagagcca |
| 87181 | aaaaaactgc caggaaaata taaaaattaa aatcatttta tttctgaaac ccatgtgttc |
| 87241 | cccccaatat cttctaacat ttctagtatt tacagaaaaa ctttcaagtc tcaatatcag |
| 87301 | aaagtttcat aaaagccaga ggaagtagca attctcttta gcagacagag ttagatacca |
| 87361 | attttcatat tggtgttctc acagattatt ttttccaatt atttcctctc atattttctt |
| 87421 | caaatttaac tccatgtatt tccatgggcc ctttagtaga gactttcttt tcatggaggg |
| 87481 | agtcatttgt gattaagtag cgatccccta gattttcctc cttggtagta gtgtttgttt |
| 87541 | attcattcat gagacattta tgtcaggtct tctatctcta taatactgta ttaggaaatg |
| 87601 | tggggtattt ttaaatgaat aatataattc tttagctaaa ataactcatg tactagagta |
| 87661 | caaacaaaca atatttctag tatagtaagt gtctaaaaca ctatgctgta cttcattcac |
| 87721 | tcattcaaca aatagcattt gtgtttctgc tagatactaa taaggtggtt agaccacaga |
| 87781 | gatagaaaga tacatagaat tgttactcca gaagaaattc cattcttgaa ccagacatgt |
| 87841 | aaacatatga ctgaaatcag tgaaatcagt gtggtgagga agcatcttgg agacatggct |
| 87901 | acagtagaga ggggatacat gagtctggag aggtcaacag aatcacatat gcccagccaa |
| 87961 | ggatgggctg tttcttaaag tctcttgaga actactaaaa gtatatatgc agagatgtgg |
| 88021 | tatctgcagt tttgtattat agaaagaaca gcttggtggc aagggagtgt gtggattaga |
| 88081 | ggaagcaaaa cgggaggtgg aaaaattcgg gagtaatcat ttgaaataat ctgagtgaaa |
| 88141 | aataataaag atggtggcca cagcagtgga tatggggata gaaagaaaag aggtggaaaa |
| 88201 | gacgtttgaa atacaagaaa gcatatgact tgggaaccgc atatggggga tggtaaagtg |
| 88261 | ggagaagttg aggatgaaac tgtatggatg acattcaaaa gacaaggagc acctgttcat |
| 88321 | agtaggaact tacctgaaaa ggagaactga gtttttaaca catgttagct tgagtgcttg |
| 88381 | taatatttgt aagacatcag agtggtagag taattggaag agatgacctc aaccaaaaga |
| 88441 | aatatagcaa gtaagaagac aagatgagcc acagatgaaa ctgtggggaa atcaatattt |
| 88501 | aagaaacagt tatctgtaga gcagacacaa taatctggag aaacagtaat ctgtacggga |
| 88561 | gactgagaag aagcaatcag aacaatcgga ataacaacag agagagagac cacaaaagcc |
| 88621 | agtggagaca tgagttcaag gaaggaggaa gtggtaagag gtgccaaata ttagaaaggt |
| 88681 | tcaagaataa ctgggactta ctctgttagc tgaacagcat gaaatagaga tgtttattta |
| 88741 | ctaataactt accatactct gggcacagag agggagaatg tgttttgaga aagggggaga |
| 88801 | gaaagcaaga cagtgaaaga aattcacatt tacacatgag aaactgaatc agaaagggta |
| 88861 | agtaaatttc cccaatgtca cacaactaga aaagtagcaa agcagagatt caaactaaat |
| 88921 | ttgtttggat ataatccatt tcttttgagg tgtggctatg actgcatttt tattgttttt |
| 88981 | tagttgatac ataattgtac atatttatgg ggtatatgtg atattttgat acatacatat |
| 89041 | aatgcgtaat ggtcagctca ggatattttg gatatccatc acctcaaaca tttatcattt |
| 89101 | cttbitgttg taaacatttt aaatcttcta gctattttga aatatataat aaaatattat |
| 89161 | taactattgt taccctactg tgcbgtggaa tactagaact tgtttcttct atataactgt |
| 89221 | actttggaat gcattaccaa cctctcttca ttccccccac aactgaccca cacttcccag |
| 89281 | actctagtaa ccatcattct actctctact tccgtgagat tcactttttg gctctcataa |
| 89341 | atgagtgaga acatgagata bitgtctttc tgtgcccagc ttatttcact taacataata |
| 89401 | gcctccagtt ccctccatgt tgatgcaaat gacaggattg cattcttttt atggctaaat |
| 89461 | agtactccgt tgtgtatata taacagattt tctttatttt taacttctat aaattaaaaa |
| 89521 | atatcaaaca tcaaggacaa aacaaaaaca aaacaaaaaa gttcccttct accccaattt |
| 89581 | gaaatgtaac aactattttt ttgtatttac taaagataca acccaaatcc ccagtcatca |
| 89641 | ttcttcactc ttcattccca gaagtaacca ccactcaaaa attgtattat tctcactctt |
| 89701 | ctgtattttt atggcatctg gatttattaa cataccagaa gatattatac agtgcagctt |
| 89761 | tgagtgtttt gtattttaag ttaaaatgtt ggcattactt tttttctctt gacattatgt |
| 89821 | tttacagata tagtcatatt gctatctgta cacctggtgt attcatttaa taactatata |
| 89881 | gcattccatt aaataaacac aagtttttat gtttttttta ttctgtgacg atgtactata |
| 89941 | gggaagtcaa tatacactac agattagcaa gagagtacaa tcaaagagga gagagtgatg |
| 90001 | tcaaatagac aaggaccttg aagttaatag tgctaaattt attagttatt tggttagcat |
| 90061 | ggacaatgtc cctaaagatg taataaaata acacgttctg tgcacagtta ataaaccagg |
| 90121 | ttgatttcag tcttaagctg tgaaagcaat tggatattaa atgaaaacac aatactgtga |
| 90181 | ttctaaagct ttgagcagca gcctagggaa tttcacctat tctgtagagg tattagggga |
| 90241 | gcagaggttg tttctgggta gaggaatgat tgacaagaca abittcagca tagccaagaa |
| 90301 | atcttgaatt atttttaatg gataataaat atagaagata ggtattattt caatttggaa |
| 90361 | gacagtcgcc tcgtggtgaa aaagagaaaa gggatgaaaa aagatgagga aaaaaaatgg |
| 90421 | ataaatctag cctgaaggct aatttgcata tttatttatt tgctgtcttt tatttctttt |
| 90481 | attaaaatgt tgacattgtt tactcagtaa aacttatttg cttgcaagaa gttacactta |
| 90541 | ctagggttta tttaagaaga ttttattctt atgagaacat gtcttatttc caaggaatag |
| 90601 | agtaagtaga tttatagcca aggaaacatt tgatttggaa cttgaggtct ccgtgttttt |
| 90661 | ggtotattaa tatttaacag atcctcagtc caaatgccta gatgottaaa tatccataag |
| 90721 | ttgtactttt agccataatg cttcactctt tcctttttaa tttgaaggtt atacattatt |
| 90781 | gctttaccaa aagacaatga agcaaaatag cctaataaca taaatttaat aaactgtatc |
| 90841 | agagcagaaa tggagagata gcttagcttc cagttaattg gaccacagtc tcgtactaga |
| 90901 | tcatcagaaa ctactgtttt tcagcatttt aaaacatgca tctttagtct cccctgaaat |
| 90961 | tatcctcttt gccagttcaa aatctttatg tccatatacg gttatttttg aaatcgtaag |
| 91021 | tcatatgtct gttcatcccc tttcctataa agctcattat ctaaacattg tctcacactt |
| 91081 | caaaggatca cctgttgatg tgaatggatt taccagtgga actcaggcaa gagattccag |
| 91141 | gctgtgagcg ttactgtttt tgtaaaggga aggtaacttt tatatatagt ttgcctgcct |
| 91201 | ttggacagtc ttgtttctac cttctaaaat acgataattg aaagcacagc gttcctatgg |
| 91261 | cttgctgata gattgtgaga aataacagca aaatatatac agctgaggag attgcatcaa |
| 91321 | tacatctctg caccgaaatt atggcagtga tttgcctaga attgggggct attagatcaa |
| 91381 | agattgtcct aaagtttaaa gttacattca accaaacaca tggacaattt ttgttaatat |
| 91441 | catattagac cagatttacc agttgttttc taaaatttaa tatacatttt ttaaccattt |
| 91501 | taggttacag aaaaagcaga aagtatagag agttttcata taacatcctc tttcacgagt |
| 91561 | ttcctctagt tttaacatct tgcattagca tggtacattt gtaacagttg aggagccgat |
| 91621 | actgacatgt gatcgttaac taaaatccat agcttacatt agggttccct cttttttggg |
| 91681 | tgtaagttct gtggattttg acaaaggtat aaatgatgtg tcaatcatta cagtatcatg |
| 91741 | cagaatactt ttactgccct aaaagtctcc gtgttccgcc tgttcatttc tcctcccctg |
| 91801 | tattcctggc atcaaccagc cactttgatg tcatatcaac tcttataccc tcataacgtg |
| 91861 | ttttttattg tcatcattgt tttgtttttg tttttctgtt aatgacgtat ggctgtgaca |
| 91921 | aggtaatgag accagojgct gttgttggag gacctttttt cttaattcct ggttacttat |
| 91981 | ccttgaatta tgtgacaagc tgataaatcc aataaccatg gattttccat tgtttcaacc |
| 92041 | tgccaatact tctctcaagc ttgtatatcc aagaaaatat aaaaaatagt agagcagaaa |
| 92101 | attacaagct tccatactta tcctactctc cctgtgtccc catccccact tctggtggct |
| 92161 | ttccaactca gttaagtcct gtacttagcc agttggtgac cacacaatgt gacatgtttt |
| 92221 | atatccaagt cagtctcaga ctaggtgagt tttttatgtg gcagattact gcttagttta |
| 92281 | tactcagaca aaaaggaaaa aattaaacat ataaacaccc tttttttttt ttcgagagtc |
| 92341 | tcatgcbgtt gcccaggcta gagtgcagtg gcgtgatctc agctcactgc atcctctgcc |
| 92401 | tccojggttc cagcgattct cctgcctcag cctcctgagt aactgggatt acaagcacgt |
| 92461 | gccaccacac ctggctaatt tgtatatttt tagtagagat ggggtttcgc catattggcc |
| 92521 | aggcttgtct caaactcctg acctcaggtg atctgcccat ctcgacctcc caaaatgctg |
| 92581 | ggattacagg cgtaagccac cgtgcccagc ctaaacccat gttttaaatt aatgcaatga |
| 92641 | ttgtattagc ctttcaaaca ttaagactgg caaaattgtt acaactatgg agttttcatt |
| 92701 | gattcatcct actcaccatc ttttccttta atatctgaac aaaccccaac tctgttcact |
| 92761 | gttctccctg tgagtagact aatggaacaa gagcaaacag taacacaaac agacgctaac |
| 92821 | acaagttcat gcagaatcaa taaaaatcag tacaacagaa gataagtcta tgtgtttttg |
| 92881 | atacatacga ttaagcatgt gcctttttaa caatttatat aaaacctaaa atatatgtat |
| 92941 | ttctgatttt tacctgtagt actgaagaag ttacttaata acgttgaata taaaggccac |
| 93001 | ttttacttaa ccaccttcca ttcactatta actgcbgttt ccaaagtgta agcaaatcag |
| 93061 | tctctgtgta catagtcaag tgtatacaag cgtcaggcgt aacaaactca agatgaacat |
| 93121 | gacagttcaa agatatttgg gacaaaattg ttgaagcatt tttacccagg gctctgtagc |
| 93181 | tctgacaatg aaagaatata gttgctcttc cagctgctat tcagacagaa agcttgggca |
| 93241 | agaagggtct gtatctatgt tcttcataat acaattacaa gtttgaactt cagataacat |
| 93301 | cagcagttgg catgtggaaa accaaaaccc tattttggta tttatcaaga ttgttaatgg |
| 93361 | agtcaggttt cccttatttg tttctttaat ggggtacaga acatcctgtt ggataacccg |
| 93421 | ctgagtgaca tgacgatgct ctgaaggaat gcatgagagc ttgtggtacc tgccttgaaa |
| 93481 | catgggtttc actaatgctg gtggctcaca cttcccattg aacaagacta gagataggaa |
| 93541 | ggctatttga gggacacagc tatggaacca taggtgccac atggtaagcc aaatttttat |
| 93601 | ttgttgtgtt gttgtgaaaa accttattaa aagagcttcc aatgagagta cttgattaat |
| 93661 | aacacagttc gtatctatag aaataatttg cttttcaaga aaatcatcat gtgctacagt |
| 93721 | tgaattgaca ttaatgttat cattcatttt gaatgatctg tgaagtattt taagagagat |
| 93781 | ctggggaagt aaatcaataa gtagtttaac ataaatcaag gtgcagttaa tttttttcaa |
| 93841 | ttagaaatat attacaaaga ttctgtcatt tccaacaacg tgaaataacc tggaggaaat |
| 93901 | tgtgctgagt gaaataagcc agacacagaa agatgcatat tactgatctc ccttatatat |
| 93961 | ggaatctaga aaagtagaat tcatagatac agaatagaag agtggtcacc acggtcttgg |
| 94021 | gggtggggga catggggaaa tgttagagtg tgacaacttg cagttacaag gtgaatatgc |
| 94081 | tctggagacc taacgtatag tacagcatag ttactctact caatagtatt ctcactgcac |
| 94141 | cccccaactc ccccacacac acagtaactc tttgaggtgt ggatatgtta attagcttga |
| 94201 | ttttggtaat catttcacag tgtatacata taccaaaaca tcactttgta taccttatat |
| 94261 | atgtacaata tttatcaatc atacttcaat aaagctggaa aaatgcatga atattatata |
| 94321 | tatgtatatg tatatacaaa tgtataagag attatagcag attatagctc tttgaaaaag |
| 94381 | aataacattt cagcccagtt ctgactaaga ccaaacaaaa ggtgatagca tgttttagtt |
| 94441 | ccttaaatgt ggatttgagg agtcaagaaa tctccaagtg taggaaaacc tccgtggcaa |
| 94501 | agagtgtaga atatgagaat cacaaaaata gcatgcacaa aatagcctgc tgtgatgttg |
| 94561 | aaagtataag agctagtaat tattattatt attattattt ttatttttat tattatactt |
| 94621 | taagttttag ggtacatgtg cacattgtgc aggttagtta catatgtata catgtgccat |
| 94681 | gcbggtgtgc tgcacccact aacttgtcat ctaccattag gtatatctcc caatgctatc |
| 94741 | cctccccctc cctccacccc acaacagtcc ccagagtgtg atgttcccct tcctgtgtcc |
| 94801 | atgtgatctc attgttcaat tcccacctat gagtgagaat atgoggtgtt tggttttttg |
| 94861 | ttcttgtgat agtttactga gaatgatgac ttccaatttc atccatgtcc ctacaaagga |
| 94921 | catgaactca tcatttttta tggctgcata gtattccatg gtgtatatgt gccacatttt |
| 94981 | cttaatccag tctatcattg ttggacattt gggttggttc caagtctttg ctatcgtgaa |
| 95041 | taatgccgca ataaacatac gtgtgcatgt gtctttatag cagcatgatt tatagttctt |
| 95101 | tgggtatata cccagtaatg ggatggctgg gtcaaatggt atttccagtt ctagatccct |
| 95161 | gaggaatcgc cacactgact tccacaatgg ttgaactagt ttacagtccc accaacagtg |
| 95221 | taaaagtgtt cctatttctc cacatcctct ccagcacctg tbitttcctg acttttgaat |
| 95281 | gattgccatt ctacgtggtg tgagatggta tctcattgta gttttgattt gcatttctct |
| 95341 | gatgaccagt gatggtgagc attttttcat gtgttttttg gctgcataaa tgtcttcttt |
| 95401 | tgagaagtgt ctgttcatgt ccttcgccca ctttttgatg gggttgtttg tttttttctt |
| 95461 | gtaaatttgt ttgagttcat tgtagattct ggatattagc cctttgtcag atgagtaggt |
| 95521 | tgtgaaaatt ttctcccatt ttgtaggttg cctgttcact ctgatggtag tttcttttgc |
| 95581 | tgtgcagaag ctctttagtt taattagatc ccatttatca attttgtctt ttgttgccat |
| 95641 | tgcttttggt gttttagacg tgaagtcctt gcccatgcct atgtcctgaa tggtaatgcc |
| 95701 | taggttttct tctagggttt ttatggtttt aggtctaacg tttaagtctt taatccatct |
| 95761 | tgaactgatt tttgtataag gtgtaaggaa gggatccagt ttcagctttc tacatatggc |
| 95821 | tagccagttt tcccagcacc atttattaaa tagggcatcc tttccccatt gcttgttttt |
| 95881 | ctcaggtttg tcaaagatca gattgttgta gatatgcggc gttatttctg agggctctgt |
| 95941 | tctgttccat tgatctatat ctctgttttg aaccagtacc atgcbgtttt ggttactgta |
| 96001 | gccttgtggt atagtttgaa gtcaggtagg gtgatgcctc cagctttgtt cttttggctt |
| 96061 | agggttgact tggtgatgca ggctcttttt tggttccata tgaactttaa agtagttttt |
| 96121 | tccagttctg tgaagaaagt cattggtagc ttgatgggga tggcattgaa tctgtaaatt |
| 96181 | accttgggca gtatggccat tttcacgata ttgattcttc ctacccatga gcatggaatg |
| 96241 | ttcttccatt tgtttgtatc ctcttttatt tccttgagca gtggtttgta gttctccttg |
| 96301 | aagaggtcct tcacatccct tgtaagttgg attcctaggt attttattct ctttgaagca |
| 96361 | attgtgaatg ggagttcact catgatttgg ctctctgttt gtctgttgtt ggtgtataag |
| 96421 | agtgcttgtg atttttgtac attgattttg tatctggaga ctttgctgaa gttgcttatc |
| 96481 | agcttaagga gatttttggc tgagacaatg gggttttcta gatatacaat catgttgtct |
| 96541 | gcaaacaggg acaatttgac ttcctctttt cctaattgaa taccctttat ttccttctcc |
| 96601 | tgcctaattg ccctggccag aacttccaac actatgttga atagtagtgg tgagagaggg |
| 96661 | catccctgtc ttgtgccagt tttcaaaggg aatgcttcca gtttttgccc attcagtatg |
| 96721 | atattggctg tgggtttgtc atagatagct cttattattt tgaaatatgt cccatcaata |
| 96781 | cctaatttat tgagagtttt tagcatgaag ggttgttgaa ttttgtcaaa ggctttttct |
| 96841 | gcatctattg agataatcat gtggtttttg tctttggctc tgtttatatg ctggattaca |
| 96901 | tttatttatt gatttgcata tattgaacca gtcttgcatc ccagggatga agcccgcttg |
| 96961 | atcatggtgg ataagctttt tgatgtgctg ctggattcgt tttgccagta ttttattgag |
| 97021 | gatttttgca tcaatgttca tcaaggatat tggtctaaaa ttctcttttt ttgttgtgtc |
| 97081 | tctgcctggc tttcatatca gaatgatgct ggcctcataa aatgagttag ggaggattcc |
| 97141 | ctctttttct attgattgga atagtttcag aaggaatggt accagttcct ccttgtacct |
| 97201 | ctggtagaat tgggcbgtga atccgtctgg tcctggactc tttttggttg gtaagctatt |
| 97261 | gattattgcc acaatttcag atcctgttat tggtctattc agagattcaa cttcttcctg |
| 97321 | gtttagtctt gggagagtgt abitgtcgag gaatttattc atttcttcta gattttctag |
| 97381 | tttatttgca tagaggtgtt tgtagtattc tctgatggta gtttgtattt ctgtgggatc |
| 97441 | ggtggtgata tcccctttat cattttttat tgcgtctatt tgattcttct ctcttttttt |
| 97501 | ctttattagt cttgctagca gtotatcaat tttgttgatc ccttcaaaaa accagctcct |
| 97561 | ggattcatta atttttgaag ggttttttgt gtctctattt ccttcagttc tgctctgatt |
| 97621 | ttagttattt cttgccttct gctagctttt gaatgtgttt gctcttgctt ttctagttct |
| 97681 | tttaattgtg abittagggt gtcaattttg gatctttcct gctttctctt gtgggcattt |
| 97741 | agtgctataa atttccctct acacactgct ttgaatgcgt cccagagatt ctggtatgtt |
| 97801 | gtgtctttgt tctoittggt ttcaaagaac atctttattt ctgccttcat ttcgttacgt |
| 97861 | acccagtagt cattcaggag caggttgttc agtttccatg tagttgagca gttttgagtg |
| 97921 | agattcttaa tcctgagttc tagtttgatt gcactgtggt ctgagagata gtttgttata |
| 97981 | atttctgttc ttttacattt gctgaggaga gctttacttc caagtatgtg gtcaattttg |
| 98041 | gaataggtgt ggtgtggtgc tgaaaaaaat atatattcca ttgatttggg gtggagagtt |
| 98101 | ctgtagatgt ctattaggtc cgcttggtgc agaactgagt tcaattcctg cgtatccttg |
| 98161 | ttgactttct gtctcgttga tctgtctaat gttgacagtg ggtgttaaag tctcccatta |
| 98221 | ttaatgtgtg ggagtctaag tctctttgta ggtcactcag gacttgcttt atgaatcttg |
| 98281 | gtgctcctgt attgggtgca tatatattta ggatagttag ctcttcttgt tgaattgatc |
| 98341 | cctttacgat tatgtaatgg ccttttttgt ctcttttgat cttbittggt ttaaagtctg |
| 98401 | ttttatcaga gactaggatt acaacccctg cctttttttg ttttccattt gcttggtaga |
| 98461 | tcttcctcca tccttttatt ttgagcctat gtgtgtctct gcacgtgaga tgggtttcct |
| 98521 | gaatacagca cactgatggg tcttgactct ttatccaatt tgccagtctg tgtcttttaa |
| 98581 | ttggagcatt tagtccattg acatttaaag ttaatattgt tatgtgtgaa tttgatcctg |
| 98641 | tcattatgat gttagctggt tattttgctc attagttgat gcagtttctt cctagtctcg |
| 98701 | atggtcttta cattttggca tgattttgca gcggctggta ccagttgttc ctttccatat |
| 98761 | ttagcgcttc cttcaggagc tcttttaggg caggcctggt ggtgacaaaa tctctcagca |
| 98821 | tttgcttgtc tgtaaagtat tttatttctc cttcacttat atgaagctta ttttggctgg |
| 98881 | atatgaaatt ctgggttgaa aattcttttc tttaagaatg ttgaatattg gcccccactc |
| 98941 | tcttctggct tgtagggttt ctgccgagag atcctctgtt agtctgatgg gcttcccttt |
| 99001 | gagggtaacc agacctttct ctctggctgc ccttaacatt ttttccttca tttcaacttt |
| 99061 | ggtgaatctg acagttatgt gtcttggagt tgctcttctc gaggagtatc tttgtggcat |
| 99121 | tctctgtatt tcctgaatct gaacgttggc ctgccttgct agattgggga agttctcctg |
| 99181 | gataatatcc tgcagagtgt tttccaactt ggttccattc tccccatcac tttcaggtac |
| 99241 | accaatcaga catagatttg gtcttttcac atagtcccat atttcttgga ggctttgctc |
| 99301 | atttcttttt attctttttt ctctaaactt cccttctcgc ttcatttcat tcatttcatc |
| 99361 | ttccattgct gatactcttt cttccagttg attgcatcgg ctcctgaggc ttctgcattc |
| 99421 | ttcacgtagt tctcgagcct tggttttcag ctccatcagc tcctttaagc acttctctgt |
| 99481 | attggttatt ctagttatac attcttctaa atttttttca aagttttcaa cttctttgcc |
| 99541 | tttggtttga atgtcctcct gtagctcaga gtaatttgat cgtctgaagc cttcttctcg |
| 99601 | cagctcgtca aagttattct ccatccagct ttgttccatt gctggtaagg aactgtgttt |
| 99661 | ctttggagga ggagaggcac tctgcttttt agactttcca gtttttctgt tctgtttttt |
| 99721 | ccccatcttt gtggttttat cgacttttgg tctttgatga tggtgatgta cagatgggtt |
| 99781 | ttoggtgtgg atgtoctttc bitttgttag ttttccttct aacagacagg accctcagct |
| 99841 | gcaggtctgt tggaataccc tgcbgtgtga ggtgtcagtg tgcccctgct ggggggtgcc |
| 99901 | tcccagttag gctgctcggg ggtcaggggt cagggaccca cttgaggaag cagtctgccc |
| 99961 | gttctcagat ctccagctgc gtgctgggag aaccactgct ctcttcaaag ctgtcagaca |
| 100021 | gggacattta agtctgcaga agttacttct gtctttttgt ttgtctgtgc cctgccccca |
| 100081 | gaggtggagc ctacagaggc aggcaggcct ccttgagctg tggtgggctc cacccagttc |
| 100141 | gagcttcccg gctgctttgt ttacctaatc aagcctgggc aatggcgggc gtccctcccc |
| 100201 | cagcctcatt gccgccttgc agtttgatct cagactgctg tgctagcaat cagcgagact |
| 100261 | ccgtgggcgt aggaccctcg agccaggtgc gggtataatc tcgtggtgtg ccgttttttg |
| 100321 | tttttttttt gtttgtttgt ttgtttgttt ttgagacgga gtctcgctct gtcgcccagg |
| 100381 | ctggagtgca gtggcgggat ctojgctcac tgcaagctcc gcctgccggg ttcacgccat |
| 100441 | tctcctgcct cagcctccca agtagcbggg actacaggcg cccgccacta cgcccggcta |
| 100501 | attttttgta tttttagtag agacggggtt tcaccgtttt agccgggatg gtctcgatct |
| 100561 | cctgacctcg tgatccgccc gcctcggcct cccaaagtgc tgggattaca ggcgtgagcc |
| 100621 | accgcgccgg gccggtgcgc cgttttttaa gcccttcgga aaagcgcagt attcgggtgg |
| 100681 | gagtgacccg attttccagg tgctgcccct cacccctttc tttgactagg aaagggaact |
| 100741 | ccctgaccac ttgtgcttcc caagtgaggc aatgcctcgc cctgcttcgg ctcgcgcacg |
| 100801 | gtgcgtgcac ccactgacct gcgcccactg tctggcactc cctagtgaga tgaacccggt |
| 100861 | acctcagatg gaaatgcaga aatcacccgt cttctgcgtt gctcaggctg ggagctgtag |
| 100921 | accggagctg ttcctatttg gccatcttgg ctcctcccca agagctggta attattaccc |
| 100981 | aacgtttaga atataatgta acagaacgta tttggaatac atttatcttt taatatttca |
| 101041 | aaggagagat aaatgcaaac taagatttta tttatcatta aattcattgt tctttagttt |
| 101101 | gaaaaacaca tatactcata tttttgtcac gtgattttaa ccagcataaa gcaatagctg |
| 101161 | ccacaccaaa gtcaagtgaa gctgtgaaaa taattaatga aacaattctg ataaaagcat |
| 101221 | ctttatcctt catacaggtt ataggcagga ttgtggttgt gcctgtgtgt gtgtgtggtg |
| 101281 | gggtoggtgg ggggatagga aagttagttt attcacatga ttctcaacat agacatacct |
| 101341 | tgcaaataat tgtgcaattc cctgctttgc tttgcagaca gaatgtcttt gaatcaatgt |
| 101401 | cttttataaa tacactatac aaaaaacata attataaacc tttaaagtat ttatgcatac |
| 101461 | tttaatattc agaactagaa gagaaatttc tgtaaggaga aatgctttgg agattaaaac |
| 101521 | gtaaaggaga taaccaaatt ttactaaacc tctatccatc atgaccacat ttcctttcat |
| 101581 | tctaaaataa aaatattttg gaaatgttga ccccctgccc accatttttg cctgagaagt |
| 101641 | tttaaatgcg aagaacttgc tcctcacttt tgaagcacgg tgctttcttt aggaaccaat |
| 101701 | ctgtatcaca tgcattctat tggtttgtat tttattacat atcattctat tacattttaa |
| 101761 | aatgcatttc tgagcccatg tcattgattt catgattcat taatgggttg caagcagcag |
| 101821 | ctggaataac actggcttag gtaatggcag tataaatcac abittggtaa aatgaaagat |
| 101881 | gcctttctac caacacgtta taatggccac tcgatgccaa catggcagtg tgttacttaa |
| 101941 | accatatatc aatcaacaca gaagcgacat aaccaaaatg tttttaccat catttataga |
| 102001 | agattatgag tttcatgcag ccaggattaa ttgcattgct attatagaac ttaatataag |
| 102061 | ttgtatcata tttgatggaa ggatgctaac tatcaagagg atataaattt taaaaacaat |
| 102121 | gatactgttt tggataagtc ctgactgtct gcattttatc tagaacaata tatgttcatg |
| 102181 | attaacctag aaaataatga caaaaatgcg caatgagtag agacttgccc ttggaattcc |
| 102241 | taaaattatt aggaaggtac aatgttctcc aagaaatatt ggtaagtgaa aaaaacaagg |
| 102301 | tttacaataa tgtgtaacgg atgctatctg tgtaacaaaa tgtgaaaaaa catatatgca |
| 102361 | attttttggc aagaagatac cctgaaaaca taaaccaaaa agccaaaaaa aaaaaaagaa |
| 102421 | acttgctgat gatacagaac ttctctgact gtacattttt ctcatagtct taactctgat |
| 102481 | aattacatac atgtttgaca ttctcaaaag taagaacata gaagtacata atatatgcag |
| 102541 | gataaagcaa ataacagttt atgtgaagat tgttagaagc caaggttttc atggaagtta |
| 102601 | ttagtatgaa gtcaaagtag tacattaaaa tccagtaatg ttaattggat ttggaagtaa |
| 102661 | cagtatgaaa ttttttctct aaaaatgtgt gcaggaatct cttgcttaag atcagtaatc |
| 102721 | tattcccaaa aatagatttt gagagcacat ttctgttcta aatgggaaca attatagtga |
| 102781 | atggaaggta aaccaaaaca tagctatttc ctacaaaata attgatacct aataatgcct |
| 102841 | gtagaaaagc atagaaaagt gacaaactct cttgataaaa tctaaaatgt atattgtttc |
| 102901 | ctaatcagca attattgatg ttgctaacat acagttgctt tgtatctagt tacatggacc |
| 102961 | gtgtatatgc tgtatgagaa attgtcactt tgtggtatag catagcaaat aacacagcaa |
| 103021 | tcaaaaagtt aaaagtcaaa attaaaataa ataaaagacc cataatagac tgtttttcac |
| 103081 | cttgctaaag gagaaatgac tcttgaagaa actcaagaag ggacaaagaa aggtcaaatc |
| 103141 | agtcattgct atttgcagaa ggtgatgggt ggatggagga caagggggca atcttcgaca |
| 103201 | aactgtcata tgaagaggaa tgaagagacc ttccccatgt ctgtgtctag tagatgctgt |
| 103261 | agagacttgc tggacaggaa agctttggta aatcttcaga aatgatgttc aagctgaagg |
| 103321 | aagatgttca agctgcattt tggttgcaaa atgcagattt gcttgttttt ctgttgaaaa |
| 103381 | attcctctat gtgatgctgt aagagttacc aggctattat taaaagaaag atgtattgtc |
| 103441 | acactgagta tgtctgcaaa actttcttag taactggcct gtttgtttat actcaatgca |
| 103501 | catgttaaga tggctacata ggattcttac tatgttctat caatttggaa tgtaactcaa |
| 103561 | cattcttcca gcacataaag ttgtttacaa tatataatga gtgtgaaaga tataaataaa |
| 103621 | tacttctatt tgatgtctac accaacatta gatgaaaaaa tgaggtagtg agaagttgat |
| 103681 | atatatcctg taaattagca tatttaaaac caaaaatcct tctactgggt aaatattaac |
| 103741 | taggaaaaca ttctacagga tataatgcat ttttctagct ctgccccctg aaaaggtcta |
| 103801 | gtagtaatgt gatctgatgg cactaaacac ttctgatctc aaatgatagc ctctaaaatg |
| 103861 | ctgttttcca acaaagagaa ttagggctcc tgaagaaatg gctgatgcca ggtgtggagg |
| 103921 | agaaaatgag caagctgagc ttgtgatata tgttcacccc agagagggct catgtcacgt |
| 103981 | gggcaccaac agagaggggt ctcaggtagc aacagtgggg ccattggacc atcaaaggag |
| 104041 | caattagggt acttgactga agcctgtagg ttcataattt ttactctaaa acaaggaagg |
| 104101 | aaggtgggaa gaaaggggaa aggaggggaa gggaaggaag aaaggaggga gggagggaag |
| 104161 | gaaggaagta aagagctaga acaacaatga aacaaaatat ctttgataac tttttggggg |
| 104221 | agtacagagt ggaaattttg catttctgga ggctttacaa gatggggatc tgtgcttcag |
| 104281 | aaataagtca gtaaagatac atttacatag atgtttcctc cagtattgct tggaaaagcc |
| 104341 | aaaatcaaag tgatgtagat agttacctaa gagatgaata aaataaataa tggtacatct |
| 104401 | tttgtatgga atattacata gccactaaaa ataatggagc agaactctac tcaatgacat |
| 104461 | ataaaaatgt ccatgatata ttgtataatg gaaaaaaatt ttaaagcaaa aggttttacc |
| 104521 | ttatttattt cacaagctaa aaccctatat gattatacaa accaatgtgt ttgccttaaa |
| 104581 | aagataaaag tctggtgtcc tctaagacca taccacaaac agtgatcacc tctgggattg |
| 104641 | gaattttata gcagttgtgg gtagagagag tttgggagaa aacattcaca ttttatctca |
| 104701 | taattcttat atttttaaag cttttctatg agcattattt tgatacatat gtgagcagag |
| 104761 | atggtccctt ctaggtacca gttacaccat tgctaaacct cgtctgtttc ttccaaaggt |
| 104821 | gtcaggcagc gaacaagacc tgccccacca attacatgtg gaataatcac atctgcagat |
| 104881 | gcctggctca ggaagatttt atgttttcct cggatgctgg agatggtaag cagaatgatg |
| 104941 | ctttaaagac taaacgccag gggtctatat tgtgattaac atactctaat attaaaacca |
| 105001 | cacatataat attcatcatt cttctaaata agtgactaaa aaatagtaca ttttctactt |
| 105061 | cacgttggta ttattttgaa ctcctttata aaggaacata ctcatgtttg tacccaatcc |
| 105121 | tttgatggaa aacatacaaa aggaagatgc ttttaaaagc ttttgtttca tgccacaccc |
| 105181 | agaaccaagt aaggtatagt aaagattctc tgactatttg tctagactca acagatggat |
| 105241 | tccatgacat ctgtggacca aacaaggagc tggatgaaga gacctgtcag tgtgtctgca |
| 105301 | gagojgggct tojgcctgcc agctgtggac cccacaaaga actagacaga aactcatgcc |
| 105361 | agtgtgtctg taaaaacaaa ctcttcccca gccaatgtgg ggccaaccga gaatttgatg |
| 105421 | aaaacacatg ccagtgtgta tgtaaaagaa cctgccccag aaatcaaccc ctaaatcctg |
| 105481 | gaaaatgtgc ctgtgaatgt acagaaagtc cacagaaatg cttgttaaaa ggaaagaagt |
| 105541 | tccaccacca aacatgcagg taagagatcc tcatgaagaa tattaattta tcttactaga |
| 105601 | aatatgctct aaaccaaaag cagttttctt aaccaaagta acaattgctt gttagaatga |
| 105661 | ggccaataca ttctgaaaga caaaaatctt atattttttt aaccaatgct aaacttgcat |
| 105721 | gagactggat ttgcttccaa aaaagcaaga caggagcctt gaggatcaaa attagatcca |
| 105781 | agctcagaat atactctaaa ttagtggttc ctgtgggatg ttttcaaaat acctaaaggc |
| 105841 | aatccacttc acccccacca aaaagtagga tgccttcaga cataatttag gacaactgtt |
| 105901 | ctaaatgcag acaattttta tgcaaaactt acaaacaaag gacaggagag taccactggt |
| 105961 | atagaattat atctggaaat gaaaatacat agctaagtat ttgatagaat tagagaaata |
| 106021 | aatgaatatg ttgttaaagg tacccaagac tcatgtctta aacttggttt tgactcttct |
| 106081 | gcatcaagaa aaaaaaaatg aagttattcg actcaagcac attcagtgtt aatcccgaaa |
| 106141 | cctcttcctc tttaatctca gagaataaat tgatcctact atttaagcca gacctgtccg |
| 106201 | tttgacattt tctccacatt ccttcaacat tgcttcatgc cattccttct ttcttctgta |
| 106261 | acttgaacat cttcaactct actttttttc cccttagttt ataaaagttc ccaaatttct |
| 106321 | tctattttat tagcctctta ctgtgaagtt gagcaaactt tagcaaccca ggtctgttct |
| 106381 | cttcaaagct gctcaaaaac gaggcatttg ttttcacctc tttcacctac catgtattca |
| 106441 | accaactaaa acctggttta tggcctacag tgctatgtta aacctctgtt taacgtttca |
| 106501 | ttggcctcat agttgccaaa tccaacagag aattttgtcc ttaggtaacc tgtcctttcc |
| 106561 | atggcctttt tctttaagct cacctcttct atgacatgac attgtacttt cctagttgtc |
| 106621 | tacttaattt tcagaccatt tgtttttaat cactttcact ggattctctt tttacatcca |
| 106681 | ttctttacat atgggtagat aatgttcttt ttaacagaaa aaagcttgta tttcatttat |
| 106741 | ttactatctt cactaatgtt cattattatt tttccacagt atataacgag ttcatctttt |
| 106801 | tattctcaag agttttgtgt ccttatttta atgtatattt ttggtggttt tcctaaacta |
| 106861 | atattttagc tactggataa aaaggcttta gtggatctgg ctatctcatt gattatattt |
| 106921 | ttcttccctt atactgcaaa gtacatcata ggtataattt tattttgaga aagaactata |
| 106981 | ttccaatttt acctatatat tcctactgta ataaccaaga ggacatttca aaaatgtata |
| 107041 | tgctactatt ttcagaagga tatagatact aaatcttttt aagccttatt aaactatgtt |
| 107101 | ttatattgaa ttcttattga gtgaatttag tatacattga aaaatctgaa attcttatgt |
| 107161 | ctgcatacct acttttctac agaattatat gaacacagac aatatttcta tcattgcatt |
| 107221 | tctcctaata ctatacattc tttcaaaaag actctgttta ctgcaactca tcctagattc |
| 107281 | atttttctaa gtgtataatt ccaagctttg tgatataaat tggagcaaaa gagaaaatat |
| 107341 | catattttga aaatatatat tctcctcatt ctctcttaat atctattaca aagtgcagta |
| 107401 | ggcagagtat atattctttg gttcattgcc ttaattaaca gcttttatgg atcattaagt |
| 107461 | atcatatccc tttttagtag aggaatacca gtagtcataa ctatgaattt gcatttgcaa |
| 107521 | agtttaagaa aaattaacta gacatgcttt cttttctaga gccaaataaa tgaaatgtca |
| 107581 | aaaccaaatt gtgtagggtt ttttatagca cacttttgat ttccacctca ggtcatcttg |
| 107641 | cacttttccc tttacaccta ttcccacaca ttaggcatgc tcatactcca aaatgttttt |
| 107701 | aaaagatagc tccaattctc accaggcgtg gtggctcaca cctgtaatcc tagcactttg |
| 107761 | gaaggccaag gcgggcagat cacttgaggc caggagttca agaccagccc agccaacatg |
| 107821 | gcaaaaccct ggctctatga aaaatacaga aacttagcca ggcgtggcca cacatacctg |
| 107881 | taatcccagc tactojggag gctgagacac aagaatggct tgagcccagg aggcggaggt |
| 107941 | tgcagtaagc tgagattgcc ccactgcgct ccagcctggg cgacagaaca agactctgtc |
| 108001 | tcaaaaaatg aagcctcaat tcactggagc aacagggcag gagacacact gaccaattga |
| 108061 | taatttgtcc tctcaccgct actggaaact ggaagtctag gatgggagga aggggaccct |
| 108121 | cgctgctgag tattgtcctt ctcacctccc tgccccagaa tgcctctgtt tcacctggag |
| 108181 | ccaaggtgga aaggaagagt tagtcaccgt catgcagcca gctgccaagt agagacacaa |
| 108241 | gagtgagggt ggggctgctc actgaggacc acagttctgc caacatggct gggtttaatt |
| 108301 | gcctggaagt ctgggtccca tacaagtccc agactcatgt gaattctgcc atgcttatgt |
| 108361 | gatcacagta agtcagcaga ccttcagtgt tcactttcag aatttctgtt ttatgtttct |
| 108421 | ttcacccatg aagcaaagag cacttcaaag gaactaatgc ttacaatacc tcatccttcc |
| 108481 | atttgttata tcagcaagca agacttttat tttaaggctt ttccattcct cttaaatgtt |
| 108541 | gtaattctaa gcagaaacaa acttttttaa acctatgaac aatttcgtca taaaattagt |
| 108601 | aattttattc cagtctgaaa tttaaaaaca cagaaatacc ttggtagcat gatgaatcca |
| 108661 | ttgccttgat ctttaacgta agtgtgttct tgtttgttct cctagctgtt acagacggcc |
| 108721 | atgtacgaac cgccagaagg cttgtgagcc aggattttca tatagtgaag aagtgtgtcg |
| 108781 | ttgtgtccct tcatattgga aaagaccaca aatgagctaa gattgtactg ttttccagtt |
| 108841 | catcgatttt ctattatgga aaactgtgtt gccacagtag aactgtctgt gaacagagag |
| 108901 | acccttgtgg gtccatgcta acaaagacaa aagtotgtot ttcctgaacc atgtggataa |
| 108961 | ctttacagaa atggactgga gctcatctgc aaaaggcctc ttgtaaagac tggttttctg |
| 109021 | ccaatgacca aacagccaag attttcctct tgtgatttct ttaaaagaat gactatataa |
| 109081 | tttatttcca ctaaaaatat tgtttctgca ttcattttta tagcaacaac aattggtaaa |
| 109141 | actcactgtg atcaatattt ttatatcatg caaaatatgt ttaaaataaa atgaaaattg |
| 109201 | tattataagc tg |
| Human VEGF-D Gene (NCBI Accession No. NG_012509.1) | |
| (SEQ ID NO: 83) | |
| 1 | aagacacatg cttctgcaag cttccatgaa ggttgtgcaa aaaagtttca atccagagtt |
| 61 | gggttccagc tttctgtagc tgtaagcatt ggtggccaca ccacctcctt acaaagcaac |
| 121 | tagaacctgc ggcatacatt ggagagattt ttttaatttt ctggacatga agtaaattta |
| 181 | gagtgctttc taatttcagg tagaagacat gtccaccttc tgattatttt tggagaacat |
| 241 | tttgattttt ttcatctctc tctccccacc cctaagattg tgcaaaaaaa gcgtaccttg |
| 301 | cctaattgaa ataatttcat tggattttga tcagaactga ttatttggtt ttctgtgtga |
| 361 | agttttgagg tttcaaactt tccttctgga gaatgccttt tgaaacaatt ttctctagct |
| 421 | gcctgatgtc aactgcttag taatcagtgg atattgaaat attcaaaatg tacagagagt |
| 481 | gggtagtggt gaatgttttc atgatgttgt acgtccagct ggtgcagggc tccagtaatg |
| 541 | aacatggacc agtgaaggta ggtgagctca atttttaatg tgatgaagtt ctttttattg |
| 601 | gctcatacag aggactttct ttgccctcac tatttttgaa acaatataaa aatgcagaac |
| 661 | catcctagta gtggactgga caggatatat cctgcatttc ttggtgactg ttctgtttct |
| 721 | tagtcttatt aaacttctgg ccatgagtat ttgaaaatgc tggggtgggg gttggttgtt |
| 781 | ttttgaagtt atggtagaac atgagcagtc tggaatcttt ttggatggag aagtttctcc |
| 841 | toggttgcat atgcagatgg cacagtggtt ttttaatgaa acattgattt gtttttatga |
| 901 | ctgataactt tgtgggccat ttattttcag gtctttgtga gcagcagagg ttagtttatt |
| 961 | cgtttggtaa attgaaaatt gcagtgcttt ctatgaacat tttctatctg cttttgcaaa |
| 1021 | ttaccaattg ctgccatcca gaaaaatgtt ttctcagaga gtgtttggtt ttttcgcttc |
| 1081 | ttgaaaggtg taaaattcaa cactaatcaa atctttggtt ctgtgagcaa gcatcaaata |
| 1141 | gagcttaacg aacagagagt aatgcaaaaa attaaccaga atgttgctga ctgctggaac |
| 1201 | aatacttagc ccaattttat gcatttcatg gattatatat attttaagct tctattttga |
| 1261 | aaatgattcg gatgtaattg ttttgactga agtggtgcta aatcattatt gatttaggaa |
| 1321 | cttctggcct tgaaaagaca attaaatgtg agtttgagtt tttgtagctg ttgtttagga |
| 1381 | cgtgcatttt caacaggggt gatatcgccc ccagcagggg aaaattggtt cgtggaggga |
| 1441 | tgaaaaagtt ttaccctttt gatacatcac gcacagacgt acatacagta catatggtat |
| 1501 | gtagtttaaa atacgttata cattcaaatt gcataggggg aaagtgtctt caaaggctcc |
| 1561 | tggcbggtgt tggtggcctg gcgagggtgg gggctgatat ttaaaaatgt tgaacactga |
| 1621 | gctggaggtg agtgggaagt caccttgtct ggcagccagc acttttctaa cttctcaaat |
| 1681 | tccaaattta catgggagaa atcacagtgt ttggctccat tttactgcca ccagccttga |
| 1741 | tattggatct caaggccaga ttgtaggtaa atgggaatct gactgtaagc ataggtaaca |
| 1801 | ggagaaaacg gtctgacttg tttgaagcaa gtaagacttt tccgactgtc cagctttttc |
| 1861 | gtaagttcat gaaacagaaa tcctttagat gtgctgggct cctcgagttt taaaatattt |
| 1921 | ccattttcct tgtaaaacat cactttatct gatggtataa taaaggagac tgaattgttg |
| 1981 | gacataagtc atattcttta ggttgctcag ctctttcaaa gagcacaagc accaagaatg |
| 2041 | tctcaggtgt cctgggcact gtgaagtttt atttatttat ttatttattt atttgagacg |
| 2101 | gagtctcact ctgtcaccca ggctggagtg tagtgatgca atctcagctc gctgcaacct |
| 2161 | ctgcctccog ggttcaagtg attcccctgc ctcagcctct cgagtagctg gaattatagg |
| 2221 | cacgtgccac catgccgggc taattttttg tatttttagt agagacaggg tttcactgtg |
| 2281 | ttagccagga tggtctcgat ctcctgacct gatgatctgc ccgccttggc ctcccatagt |
| 2341 | gcbjggatta caggcgtgag ccaccgcgcc cggctggcac tgtgaagttt taaatgcttt |
| 2401 | gaatgtactg ttaatatata aatttgttga atggagtaac gaaggaaagc agctgaattt |
| 2461 | gcatgtgaca gaaaacaagt tgttacacgt ggaggatgca gcattatata cttactaata |
| 2521 | cgattagcaa ttttttttca gaatatatca gaatttcctt taaaaagtga agctacatat |
| 2581 | actgaactta tatccaccct acccctcgct caattaaatt atttctgata tgaaggaaag |
| 2641 | gattgcctat agctaaacag aagttttggc atagatatga ctgagtggta agggataatg |
| 2701 | agatatataa tattggttat agttttcttt tttccccaac ttttaagaaa agaaaatcta |
| 2761 | agaggaaata atgtttctaa atgttaaagt tcttcttgtt aaaattaaaa tgtagtgtga |
| 2821 | aaacatattc atggtggtaa tggtttaggg tggtggtatt tgaatttttt gttttttttt |
| 2881 | ttttactttt tgaaataaaa tgttttattt attataagaa attcatggtc ttcctcggta |
| 2941 | cttggtccat atgtatttct ttctcctcac cctcccctct tctaaccacc tcttttccag |
| 3001 | aatggatggt gatgccaatt ttgctcctag gttgtcctcc agccaccccc agcccagttt |
| 3061 | tcactttcta gctttgaaga ttgtccagtt ttccagctta gactagcatt gcctctacga |
| 3121 | tagttctagg tatctgtgaa gatttttttt tttcctgtag caatcatgaa atagctacta |
| 3181 | gtgctctgga cgattgtgct taatgccatt tgggtgtaag gcctcctaat ttcattagtc |
| 3241 | ttaccacttg bitttgcaag gatagctgtt tggagtcagc agtgcatgga acatgtgaac |
| 3301 | tgagacaaat ctgtttgaaa atctcaactt aagatttcaa atccactgtg tatactattt |
| 3361 | agcbgttaag tttctcagtc taagaagaac acgttttcct ctagaaataa gcttaaccca |
| 3421 | gtacctatgc atcgttcatt aatataatca gattacggcc tagatgtgga atttatttct |
| 3481 | gtttctattt tctccagctt tttaatacag ctcagacagt catatacagt tgtacacgat |
| 3541 | gtgcactgca caactctagg gtgctccatg catatagaca tatctgtatg tgacagccct |
| 3601 | aagtacaatg tggtagacac tctggacatt tggtaaataa gtatctacat cctcactctt |
| 3661 | ctctcattca cattggcctt ctggccagca ctatttctgg tttatttaat aaacaattct |
| 3721 | tgtcccccag aaattctgtg agtcttctga agatgccggg gaaagccagc cttcataaat |
| 3781 | cttttcaatg tcactaatga agacatgtca ctattgcaac aaaggaatac caggccatag |
| 3841 | taggctttca caactttttt ctgacagaat ttgtttcttt ctgctttatc ttccctgtgt |
| 3901 | actgtctttt tttatccacc ctctttctta attacactgg tagaagaata ttggtgggtg |
| 3961 | atggagtcat tcacattctg tgtaagacta gaatcagtcc aagatccaca ggaatgtggg |
| 4021 | atacttcttt catgagaagc cacatggctc acaagacttc tttacatttg tgttacttgc |
| 4081 | cttctcctga aattgtotct acagtgaatc aaataacaag gactgaggtg tattttccat |
| 4141 | atttaattcc aggaagcagt cccactcctt ctccctgccc gatttccagt tccaaagtca |
| 4201 | tgtacaggga agtccattga ctttgatgtt ggtcaaatgg cccagcaagc ttttgtccac |
| 4261 | ttttctgtca gacacagtcc ttggcacaaa agacatctga aatacttccc attaatttct |
| 4321 | tctttattta tgaccttgta gttaagtgtg ttgaattata tgcttctata cacatctgtt |
| 4381 | ttaatccagt tactcactta taactggtga ctgaaacttt tatatcacta tagcgtatta |
| 4441 | ttggtaccca ggatacaata gaatcctcaa tatcttacat cttcaatata gtacttcctt |
| 4501 | gtatgactta tttcttaaca taaaaatcct gttttagacc tgtggataaa cctttactat |
| 4561 | aaatcccaga gacaatttct ggaatgagaa tatagtattt gtccacacac atgattccat |
| 4621 | gtagaacttg aggtaataag atctgggact cccagataca tttattatta ccacaattgg |
| 4681 | atagaggtgc tacagaaata ggcacacaaa tgacagtaaa attgtttctg agaacatttc |
| 4741 | taggctcaac ttttttctac aacttaggat gaacagagag agtggaaact gtatataatt |
| 4801 | gggaatgtga ctgagatgag acaaagatga catggaagca tttcttcttc ccttgctttt |
| 4861 | ctggtggtaa gttcactctt ctgtcttcct tgccactagt tcttgcagtc cctaccaaga |
| 4921 | cactagggca ttatacagca aacacaccct gaggccccct gctactgcat catgaaagcc |
| 4981 | ttagctggtt gtgatgtcct agttcataaa gaatctgcct agtctctcat tagagctttc |
| 5041 | caatatttga caattcattc atttattttt ttcaacaggt atttattggg caccaatata |
| 5101 | tctaggcatt gatctagggg ctgggaatga agcaggaaat aagtctaggg gctgggaatg |
| 5161 | cagcaggaaa taagacaatg tttcaattct cttggaattt gcattccaag tgtgatgggt |
| 5221 | agaggcagac aatatgcaaa tgtgtaacat gtcaggtgtg ataaatgcta tgaagaaaat |
| 5281 | caagtagggg gagcggatac agtactgaat aaatcagagg agacctttct gattcagtta |
| 5341 | tgtctctaca gagtcctgaa ggtaataaga gagacagagg caaccatcag tgcagtggcc |
| 5401 | atggtgggcg cagcaagttg gcttcgatgt ctgggtatta gccagggagc cggtgcagct |
| 5461 | ggaggtgggg tgagtggagg ccagaagtgc agttgttgag gttggagaag tagccagaga |
| 5521 | agatcatgta aggtgtgact gtgctcccat aaaactttat ggacactaaa aattgaattt |
| 5581 | tatgtaattt tcctgcatca tgaaattaaa aaaaaaattg tttcaaccat tggaaaatgt |
| 5641 | aaaaaattgt tcttagctaa caggccatac aaaaacaggc tgcaggttag atttggccca |
| 5701 | tgggtcatag tttggcaatt gtgttatata taaattatta cactgtttta tcttcatcat |
| 5761 | ggtacacatc catacctgac atgttttatt tgcctgtgta tacatttatt gctttgtcac |
| 5821 | cgtctactag aatacaagtt ttttgagaaa aggagctctt aattgtcttg tttactgcag |
| 5881 | catcccaatc accagtgaaa agcctgtatg taatagagta gatactaaaa acagtatttg |
| 5941 | ttgactgatt gatggactag acctcaggat ttttagatac ccaggatcag gatatgaact |
| 6001 | actgcattaa atcatctcca acatctactc tcatgatggc ttgtctgact tcatgattta |
| 6061 | aaaaaaattc taaagcattt ttaaggcagt atattcaccc tgtgctattt tcctgtgggc |
| 6121 | ataggatagg gtttgtgtgg atgtatcaaa gacttctcca ctgtccttcc aggcacaagc |
| 6181 | catcctataa ggcgttccct tttaggagcc agaggtatag aaggaagtca tctgagccca |
| 6241 | ttattccagc ctgttggtaa cagaaagaga gatgagcaaa gtagcatttg gctgcacagg |
| 6301 | ggtctggaca aaacttcaac atcttgatgt tttccttcat ccctgagagc cttagaaatg |
| 6361 | ctacctatgc tttcatttta bittaggttg tttgtaaaat catggtaaat tatggcaaaa |
| 6421 | tactctggtc agatacttta tcaggttagg ccaggatatg ctgtgaaaac aaacaccccc |
| 6481 | gaaatcttgg tggttcataa acaacagaga cttatttatt gcttatacca catgaccagc |
| 6541 | ctggttcatc tggggtcaaa tccacatggg gatgaagctg gctgagtatc cgatcttgaa |
| 6601 | tgttaggaat cactatgaca gagggaggga gagcctgaga gcgcctcacc ctggcactta |
| 6661 | aattctctgg cccagaagtg acacatatta cttctagttg cagccccttg acccactgcc |
| 6721 | ccatctagcc acaaagggcc aggaagtgca atcccaccat gcgctcagaa ggcagagaga |
| 6781 | tggaaatatt tgacaaaccg tattaatgac tgtgacacat ggtgagttct tcacattggt |
| 6841 | gacttctaag tgcttctgaa cacacctttg actgtagaat gtcaaaaaca ttctcaattt |
| 6901 | tacagcagtg ctggaaaatg aattgtattg agacaacttg ggaggagtag aaggagatgg |
| 6961 | aataaaaaaa attcactgat ttctgtcatg tgtcatgcct cctttaatgc acggaagaac |
| 7021 | gtatactttg cttaggaaat cacattacca cattcagaac aactttagtg aagatgggaa |
| 7081 | acaaccatgg ctggtcaatg gggtaacgtg tgctgaagga agacaggttt atttctcagg |
| 7141 | aggcatcttc tccctgggaa aaggaaagac acatattcat ctcagtaaat atttgtggaa |
| 7201 | tgtctaccat gtgccaggca tatgagtgga aatgatgttt ttataaaata aagatgtctt |
| 7261 | aagtatttgc atgtcttact aacagtcagg gagttcaact tggccagtgg gaaggataat |
| 7321 | tttatgcctg aaactttagt aatgtaaatt tttatgctga ttctcttttt gtcattcact |
| 7381 | gagtattcct aagtaactat aacactcaca tattggagat aagtattggt ttcctgaaat |
| 7441 | ctaggtttgg ctaacattgc ttctggaaag agaaaataac abitgttgaa tgtccctatg |
| 7501 | gcaaattctt gctgttactt actgttccat tatggagagt gttagaaaga gtgtaatttt |
| 7561 | gattgaatga atatgctaaa aaaaacaccc taaataagaa actcacaaaa agaacagagt |
| 7621 | ggaatgaaaa agtgaaaaca actttgcaat ggtgtgcttc gtttataagt acattgtcac |
| 7681 | agcaagacta gggatgattg ggcatcttag agagtgcaga ggatgttgat aaggaagagg |
| 7741 | aagaggagat aagtggattt tgatatggga cactagatcc ttagggaaga aatgtgaaag |
| 7801 | agggtattct gggctgactg ccgctggcat agcaaggctg ctttgtagaa gggacaataa |
| 7861 | agttttgcat aaggatcctt tttcccatcc aatggattat gctatacttt agctggaata |
| 7921 | gggctgtagc agttagctat tgccacaata atgctgtgta acaaagcagt ccaaatttca |
| 7981 | gtggcttaaa acatcactac cttattctca cttatgtctc caagtcagct gggagtcaga |
| 8041 | ggattaaggc tcaaggctta ggtttggtgc aggtcagccc caggtgtctc tcatcctcct |
| 8101 | ttgatcagtg ggctagcagg agcatgtgct tgcaatgatg gtggaaatag aaaaacgtgc |
| 8161 | aatcatatgt gagtttcaag cctctccttg catcatgtct tgtaatgtcc tattggtcag |
| 8221 | tagggcbjgg aaatatatcc ctccctcaga gagtcaggag tggaaatgaa aatgttttta |
| 8281 | acaatagcct aatcaccata aaggctttgg gtggcacact gggcccttga tcttggagat |
| 8341 | cagtgataga ctgtaacaga cctcagaaac cccttggggt tattcagagc atacttctag |
| 8401 | agggtctggg gttgtcttgc cattcaagcc catcccacac ccatctgccc ccacatatcc |
| 8461 | taagcacagt tatgtcaagt gagaacagag gcatttgagt ggagcacaga tttcaaacac |
| 8521 | ataaaggcag ggcatggcca tctcccgcag tgctagatga tctggcbggg agaaaaccac |
| 8581 | aagcagtctt catcaaattg gaggatgtgg aggtcccagg catttagtcc cctagtatgt |
| 8641 | ccttaaaaaa cccagacagc catgcacaca cactcacaca aatgcacacg cacacacaca |
| 8701 | tacattcaca cacacactct tttcctgcat ttgtagttcc tttcctcagt ctaagtttaa |
| 8761 | ttaaacaact tggatttcat atatattcat ttaaatatag aattgcataa agaaaagagc |
| 8821 | caccagaacc accaatggta gcatgaggcc tctgaaatga aagatgagcc caccccaacc |
| 8881 | ttaaatggcc aggtttctgg atttcagaga agcaagatca gacccttggc aggttccatc |
| 8941 | tgagcagcca cagcagccat agctacagca ataattatta gcaagtgtgc gttctccctg |
| 9001 | ccctagttag tacaccctat accatcaggt gtcatctgtt ctagttaaag tcagaccgta |
| 9061 | ataacaaaac atcaaaatgt aaaatgtggg ttgttttttt ctttacacac ttctaaagac |
| 9121 | atttaaagcc tgagcagata ccttaaaatt catcttctat ctgaaaatac ctcctagaac |
| 9181 | cattttaaaa aggagatgga ggcaaggtgg agagaaaaag tttgtctttg gttgacactg |
| 9241 | ggaaagttgt cttttaaaaa attttttaat gtttatttac tatggagttg ccgtgtcttg |
| 9301 | ctcttttcaa gctcacctgt cojgcttcta aggaatatca ggggccctaa aacacagact |
| 9361 | tctaaacccc aacacatagg acacacctaa gtgtggaaag aaaggaaaga ggcaggaaag |
| 9421 | aaaggaaaga ggaaggaaag aaaggaatgc aacatttatt gtgtgcctac catatacctg |
| 9481 | accctttcct acatatgacc acatatgatc tcttcatgag ctttatgagg tgacctatta |
| 9541 | ttaacaatgc tgctttataa atgaggaaac caagccttaa ggaagtcaaa taccatatcc |
| 9601 | tcagtcaaat agctaaaaaa aaaaaaagaa aagaaaaaga aaaggtagtg cctggattca |
| 9661 | aagacagctt atttttttaa cttatagagt aaaatggatt ttttcccttt tggtgtgtag |
| 9721 | ttctatgaat tctaacacat gtatagattt atataaccac aaccataatt aggatacgga |
| 9781 | actattccat caccccccaa aaattcactt acgttatcct tttacagtca gaccttcctc |
| 9841 | ccagcctccc aacctctggc aatcactgat ctgttctcct tcactgtcgt tttgtatttt |
| 9901 | tggttcgctg tcattttggt tttttgggaa tgtcatataa atggaatcat acagtatgta |
| 9961 | gcagtttgag attggcttct ttcactcata ctgcctttga gattctacca gtgtcccagt |
| 10021 | agttcattcc tttttattgc tgagtagtat tacatcgatt gctgaaccgt tcacccattg |
| 10081 | aatgacacat aagttgtttc tagttttttg gctattgtga ataaagctac tacaaacatt |
| 10141 | catgtacatg tatttatgtg aacataaggc ttcatttatc aagggtaaaa tccccagaag |
| 10201 | taggactgtt gggtcatatg gtgagcatat gtttataaga aactgcaaac acattttcca |
| 10261 | gagtgttata ccattcaaag ccagttttga acaattcaaa tctatgcttt ttctttccag |
| 10321 | taagcbgttt ctccagacga cagagtggtt tactatatta ggcaaagctt catcttgggg |
| 10381 | aatgttattt ccaactgaga gctatgggag gcaaagtcac aaaccttcag ctcagactca |
| 10441 | ccaatctaac ttgatctggg aagatacctc gacaggtggg ggagggagaa catctgctga |
| 10501 | ggaaggccgg gagtggagtg agacattgct acttggaccc caaaaccagg aaaaatttgg |
| 10561 | tggttttggt tgagcttgaa ccatcaggtt aaacaggaaa tgcaaaatgc tcttccagtg |
| 10621 | aaacagaaga agctgctaag aggtagaggg aacatggaac tatttgtatt gcaaccgaat |
| 10681 | ccacctcccc aaacccactg caaagggaaa ttgctgactg caatgtccct gaactccagg |
| 10741 | gtgagtaaga agagaaccac gccccccagg gaacacttgt aaatttttaa gcaaatctag |
| 10801 | ggaaagttgt gtaaaatgtg tcccttccat aactcaccct aaagcttctg ggtattctaa |
| 10861 | atatacaaat tctattcatc acaccgtttt atcaccaagc ttcctgaagg catattgcca |
| 10921 | acacaatttg acaaagaaaa tagcaccaac agotttttaa agccttggaa ggatagtctc |
| 10981 | agacccatgg ctctctagag gtccagggat gaatctagca aagctggcct ccttttccat |
| 11041 | atatatagaa caagaggatt gttaatagca tgggattgga atggctcaag aaaagctttt |
| 11101 | tgaagctctt tgagaaaagt agccagggtc cccccttaaa ccttctttgc tgatggcctt |
| 11161 | acagctcaaa accagcattg gaaccggcta ggtactccca aaccaaagcc tcttccactt |
| 11221 | ggcatgtata tttatattct catatcttct ttcaaatacc tttcagtgtt gccttttgaa |
| 11281 | aagattataa tttgtacttt tttgttgaat tcagtaggtt aaagcagtac ctattatctt |
| 11341 | taattttatt ttgaaaaatt ggttggtttg gcttttgggg aatttgagag gcaatttagt |
| 11401 | ctgtcattta ggatggcatc atataaggca gccaacttca tcatgctatt tagcctgaaa |
| 11461 | agcgatattg ttgatcttca accttgaaaa agtcgtacag gttgggagct gacctgcaaa |
| 11521 | tggtcaggta tcttgagata ggaaaaggat ttacaaatcc aggtcagcaa gatactcata |
| 11581 | caaatatttt gaacccaagg tatacatcaa atagatttaa agactaagac tatttctgag |
| 11641 | catgcatcga ctgtttgaag actagtggac ttgtatgaag ttcaggagtt aacctgggtc |
| 11701 | ttgtaactta aaaacagcat ttctcatgcc ctaaattagt agtagagaga caatatagag |
| 11761 | agttcctata tagccctcac ctatcttcct ctaaggctaa cacctgggaa gttttttttt |
| 11821 | aaaaaatcct gatggcaaag ctgcagccca gacccaaaaa atgagaatct gtgagattta |
| 11881 | agattcgagc atcagtattt ctttgaagct tattcccagg tagattcaag aagaagccaa |
| 11941 | gattttgaat gcctgcttta ttattttttt ttttgtgaga gctttaatgg cacaaaatgt |
| 12001 | ttatagctac aagttataca tgtattgtaa attgtatata acgatacaaa gtgctaacta |
| 12061 | aatagatgga gaacgcataa ccactttggc tcagttaatc caataatttc cacaatgggt |
| 12121 | tcatgaaaaa cctcatctga ctggctaagt cttcaattct cattttttta gaatagtaaa |
| 12181 | tatttttact gcaatcacag gaacttgttg cgctttccaa tgtgcaagtt tctgcagttt |
| 12241 | tgctcttgat tctatttaca aatatcttaa gccagttttc atcaaacata tgaaaaatga |
| 12301 | agcctgcctt tttgtcccca aattgtaaat aggtgtaaat ctttttaagc atcaatctca |
| 12361 | caatttcaac agttaattgt tgaattctcc tttccaatac acgatgtttt cgttcaacac |
| 12421 | aaatctgggt agtagtaaaa tgttcatccc gtgtgttagg gctacagata catactacgt |
| 12481 | gctctcataa taaattttac tgttatgatg tattcatttt ttaagtaatt ttccataatt |
| 12541 | tcactgatgc tttaagaaaa agagcaacac tatgtttctt tttaacgttg aaagaaatca |
| 12601 | taaatatacc caggttcaat ggcgctactg atagaactgc tgctgaattt ggaatgagca |
| 12661 | caatgcacta gctgtaagaa gtcagttttg ggtaatgaat aattttactt ttccctcctg |
| 12721 | taataccaat ttcatactgt agcagtttat ctagtcagtt ctcctaactt tctgtccttt |
| 12781 | ccaattttat tcaggctttt caaaaatcag tgagccatca gatttacttt cttcccaaag |
| 12841 | aaattcaaat atgaatgctt gaaataaata ggttatagaa ggcaaatcaa gtgttatcag |
| 12901 | gtttaagatt aagacagaaa catggtctaa taaaaagatg tccaaaatta tctagacatc |
| 12961 | aaatgctaga aagaaaaaag aaaattactt gcaaaactat ttaggatata tcatctttct |
| 13021 | taaagattgc cagctatatt cttgaaaaaa agataaaaat tttcttgttt aacctgcatg |
| 13081 | ttattttcca ctataacatt aattttacaa atgttgatgt gagagagaag agttagatag |
| 13141 | tttctgcaaa ctggcaaacc tggctgtgat agtgttttta ttcaagttaa cctggtgcac |
| 13201 | tttatagatt gctagottta aaattaacag tgtgaacccc tgotttaaac ccttctcaaa |
| 13261 | gtgcagtcag ccaatcaaca gtattgccat cacctgggaa cttgttagac cccactttgt |
| 13321 | caaactcatt tcctggtatg acaatgaatc tggctacagc aacagggtgg tggacctcat |
| 13381 | ggtccacatg gcctccaagg agtaacaccc caggaccatc agccccagtg agagcacgag |
| 13441 | agaaagagag aggccctcag ctgcttggga atccctgcca cgctcagtcc ccaccacact |
| 13501 | gaggatctcc tctcctcaca atttccatgc agaccccctg aagagggaag ggcctaggga |
| 13561 | gccccacttt gtcatgtacc accaataaag ttccctgtac tcagccaaaa aaaaaagaaa |
| 13621 | gaaagaaaaa agaaaaagaa atgcagcatc ctgtcttgcc ccaaacccac tgcgtcagaa |
| 13681 | tctgcatttt aacaagatcc ccaggtatgc acattaagtt ttgagaggca gtactacata |
| 13741 | taaaatatgc aacagaccac acaaacctgg gcccaattgc tatttgtcag atacatgtat |
| 13801 | gtatttatta cttataaatt ccttcatcag atatgtatta cgtgcttatt actttaaaaa |
| 13861 | gatgaatctg acacatatcc taccctcaaa gagatctcag tctaggaagg gaaatacaat |
| 13921 | gtgttcataa ataatatagt ctaagttagg gacttcataa aatgcttgat ggaagaagtg |
| 13981 | gcatttattt tggacctgga atgagaactg aaagaagata ttcaaaagac aagtgatgta |
| 14041 | gtgatgtagt tttgaataca cgaataatct cagggttact ttttctatag cttttggtga |
| 14101 | atcaagttgt ttattcatac atttaataaa tatttattca gctcttacta ttgctataag |
| 14161 | acagatacca ttactgctca ggtggttttt acaacctagt ggggaagaca agcagataac |
| 14221 | aagaaatgac acaattcatt agtgttactg gtagcgttgt gaaggacaag gatggggtgc |
| 14281 | tagaaatcca tgtgacggac cagacctagg caggggtggg agttatggag gaggtttccc |
| 14341 | tgagtaggta acatctaagc tgagaaagat ttagttagac aaagagtgaa tggcattcca |
| 14401 | ggcaaaggaa acagcatgga ctaaggtcaa aacaagaaga aatgaacgaa agagcaagtt |
| 14461 | gataaaatgg atgtccaata atattccatt gttcaactat gcaacatttt tcattgcctc |
| 14521 | ccaaattgga tcaaagtagc ctggtcttca tgcctccagt ccttcctctt tttaaaaatt |
| 14581 | ttatacaact atattaatat agaatttaca tactataaaa tttcattcaa gtatattagg |
| 14641 | aaatttactg agttgtatag ctatcatcca tataaggtcc gttatgtccc tttgcaatga |
| 14701 | accctccatt ctcactccca gcctcaggca gccaataatc tattttctgt ctctaggggc |
| 14761 | tggaaactta ggattggaat tagttggttg tataataaat ttagcttatt agagaactgc |
| 14821 | tgaactcttt tccaaagcaa caatacaatt ttacagtttc atcagccttg tgtgagggtt |
| 14881 | cctgttgctc catatccatt acaacacttg gtattgtcag tccttttgtt tatagccatt |
| 14941 | ctactgggtg tgaagtggta tctcatttca ccagcccctc ttcctaactt atttgccaga |
| 15001 | ttccccactt ctaaacttgc tctatgccca accaaagtga accccttgct gttttttttt |
| 15061 | tcccctgagg ctcgttgata tccccaaatt atgcctttct tcattctttg aatgtgttac |
| 15121 | ttgactggat atgtattttt ggtgaaggag aggggctgga aattgagaga tgaaattggt |
| 15181 | aggagtacag aaggccgttg acttcctcac aacgtgggac acttccaagt ttctcctaca |
| 15241 | aaccccacca ctataccttt ccaaatatct tgcctgccat cttggtcacc cgtgacctaa |
| 15301 | attaatactt aggaagctat ggagatgctc atgcttcctc aggggagaat gctgtgtgaa |
| 15361 | cttagaaatt agcaaaaggg gaaatgacta cccttgaaat tgtaccacag aaaggagcat |
| 15421 | acattcaaat gatggtgaag tcttattaaa aagactttaa gcctcccaat ttagaagctg |
| 15481 | gottgtggta gccaagaaat tagagaatga tttgttattt aagagtgaaa ttgctagtag |
| 15541 | tcttgaatta attaccataa aaaagctgcc gctgtaataa aaagcagaga tctggtaacc |
| 15601 | ctgcttcatt cactttcttc ctcttgatga aaacctttta attattttga ttttgattag |
| 15661 | cacttccatc agaaaatagg aagaaattag gagcaattta cttggcaaag gtttagtaat |
| 15721 | taaaaccact gaaatcaatg gtttaagtat gtatttggga taaacacatt tttaattgtt |
| 15781 | atttttgtct tacccaagtg gataacataa agttcattat acaaaaatca accagtgcag |
| 15841 | aaagccgatt gggaacaaac aaccattctt gaaccctttg aaaatgtatg cccttgatga |
| 15901 | attacttgtc aggtttctac ttaagtttaa ttgttagtac ttccacttaa aatagcaaaa |
| 15961 | tgactgtctg caatttctgt tatttcaaac taggttttaa attctggggt tgaaagtaag |
| 16021 | cttaaataac tctgagtact tgagtaaaca ctgcattttt tatgatgagg caagttgtat |
| 16081 | gagccattta attactttaa ttcaatccag agatttgata ttttctcctg agttctcaca |
| 16141 | gttggatagt ttaaaaatat ttctaagatt gaattgaatc ctgtaagaac tataataaaa |
| 16201 | ccatacatct gcctgttttc tttctttctc tttctctcct ttcttttctt tctttctttc |
| 16261 | tctttctctc ctttctttct ttctctttct ctcctttctt tctttccttc ttttctttct |
| 16321 | ttctttcttt tctttctttc tttctttctt tcctttcttt cttctttctt tctttcttct |
| 16381 | ttcctttctt tctttctttc tttctttctt tctttctttc tttctttttc tttttctttc |
| 16441 | tttctttctt tctttctttt tcaagatcgt gctccattgc ccaggctgga gtgcaagtgg |
| 16501 | cgagatcatg gctcactgca accttgacct ccccaggctc aggtgattct cccacctcag |
| 16561 | tctcctgagt agcbjggagt acaggcatgc accagcatgt ctggctaatt tttgtatttt |
| 16621 | tagtagagac agggtctcac catgtttcca gtctgatctt gaactcttgg gctcaggcaa |
| 16681 | tcctcccacc tojgcttccc aaagtgctgg gattacaagt gtaagccacc atgcctggcc |
| 16741 | ttgtattttt ggataatatt gagtgaaatt tgcctcaata cataaaaatc ctttcaatat |
| 16801 | gcttcaactc taaaatcttt aaaaagctgc ttggtttcat tattttcacg tggaagcagc |
| 16861 | attgtcacaa agttttattt tgaagactga attgtatatg gagtactgtc caactagaag |
| 16921 | agaatgaata atcaggaaaa gagagactat tgacaaataa gacttaatgg agaagcattg |
| 16981 | aatttcaaag ctgccagaga cattagcaat tgttcagttt catctccaga tttcttagat |
| 17041 | gaagaagctg tggcaagcca atttcacaaa cccgatctat gatcctcatg ctccccactc |
| 17101 | ctctcactcc cacaattttg ccttgattca aactttatcg aaaagtgaga aatcacaggt |
| 17161 | atgagctcac tgagcttccc aggcagtctt gccatctaca aacccatgtc attctgtatt |
| 17221 | ttcctcttgt ttctgacagt gatcctctca tctagtcaca ctacatccac ttatctctgg |
| 17281 | cacttatgtc aaaacaaccc ctctaggtcc tgccttagct ctcctgcata tgctttttct |
| 17341 | ttcttcctgt ctgttgcctc tttcccccag cttataattc tcccgctttt attaaaaaca |
| 17401 | tgcacccaca gacacacact cacatctgga ttcccaagtg cgataacctt gtagattcat |
| 17461 | attttcagat cgttcttagt ccacagaata taaaattgat tgaatgatgg caaacatctg |
| 17521 | cagatgacaa tcatttacag aaatggcact aaagccatga agctgaagct gcaggactta |
| 17581 | tggatctggg ctagaagaca ggggccatca aaaatttagc ttcagttgga aatcggctct |
| 17641 | tttagtgcac tacatcagat ccatgaaaga ggaaggaaga gttactgctc attgctgcct |
| 17701 | ggagctgtga cttctatgaa attacttaac ggggcaaagg aggaagcaga tacttccttg |
| 17761 | caactaggac gtgagctgag ctgatocctg aatcataaat actcaacaag attcggattc |
| 17821 | aggacccagg gtattatggg gtacaaccat aaaacttcta aatgttggag aaagaataat |
| 17881 | gagaaagaaa aatgaatctc tgaatgaaaa tggaactact aaccaaaatt ccaaatcacg |
| 17941 | ttaatataat tattactaag aatgacagca acaaaatgaa taatcagtat atgtcatacc |
| 18001 | tataaagtta aaatctaaaa taatttgaag aaatacttaa aaatatttgc aaccctcaaa |
| 18061 | gagataaaga aataatattc ataaaattga aatgacaaac taggggcagg gcgcagtggc |
| 18121 | tcacgcctgt aatcccagca ctgtgggagg ccgaggtggg tggatcacaa agtcaggaga |
| 18181 | tcgagaccat cctggctaac acggtgaaac cctgtctcta ataaaaatac aaaaacaaaa |
| 18241 | ttagccgggc gtggtggtgg gcgcctgtag tcccagctac tcaggaggct gaggagggag |
| 18301 | aatggcgtga acccgggagg tggagcttgc agtgagccga gatcgcgcca ctgcactcta |
| 18361 | gcctgggcaa cagaatgaga ctgggtctca aaacaaacaa acaaacaaac aaacaaacta |
| 18421 | ggaagaatat acagaaatgt aacagaaagt agataggaag aagaatgaag tagaaatgct |
| 18481 | tgaaattaga aatacggtga ttgaaattaa aaccttaaca aagtaaactc tagactcaca |
| 18541 | acaattggag agttggtgat tggaaagatg aaccaattaa tttacccata acacattaga |
| 18601 | gagaggtgaa gaggaaaaaa tagctaaata taaaagcaca tttaagagac atgtaagatg |
| 18661 | attaaaagcc tccaacattt ttcaaaaaag agagtagagg caatattata ggtggaataa |
| 18721 | tgaaaatgat aatggctgag aatattaaag aattgagaat aaaaaagaca agtggcctca |
| 18781 | gattgaaact gccatgaagg tctctgtctc aaattctcaa ctctgctttt gtagtatgaa |
| 18841 | agcagccgta gacaataagt aaatgaatgg acatggctgt gtgtcaatac aacttgattt |
| 18901 | acaaaaacag gcaggcagca ggctaaatta ggcbgggagg tcatagtttg acagctcttg |
| 18961 | atctaaagaa taaccattgt tggccaggcg cagcggctca tgtctgtaat cacaacactt |
| 19021 | tgggcggcca aggcgagcag atcacttgag cccaggagtt caagaccagc ctgcgcaaca |
| 19081 | tggcgaaacc ccatctctac taaaagtaca aaaattagcc gggcatggtg gcaggctcct |
| 19141 | gtagtcccag ctacttagga ggctgaggca ggagaatcgc ttgaacctgg gaggctgagg |
| 19201 | ttgcagtgag cggagatggt gccactgcac tccagcctgg atgacagagc cagactcggt |
| 19261 | ctcgaaaata aataaagaat aacctttgtt tacattttca tgtatatgtc tccagatgtt |
| 19321 | cctcatatat ccatataagt atgtatatat gatgtacata agtgcataag taaaaataca |
| 19381 | taagtaattt taaaagaggt tatatcatag ctgaatcaca catgacttag accacacttg |
| 19441 | ctcttctgag tacccatttt tggacaactc tcagtgtcca ctagcatgtc taaaaaaaat |
| 19501 | ttctcctcct aaaatgctaa tgcatgatgt agattttaac tacagctttt gaggctcagt |
| 19561 | ggaggagagt gtacatcaca ctacccaatg caaagccttt taacagcccc ttttgctcat |
| 19621 | ctttgttttc cttcactgtt cctcgccctg cagcaggcag ctgacattca cctttccctt |
| 19681 | ccaccctcct ctctcagcac tggtcctttg cctcctccct catcccagct ctacaaatgg |
| 19741 | cctcagcctg catattccaa ccacccagca aaacaaacat ctagtaacta ccgggtcagc |
| 19801 | aagagaaaat cggaggccct agccatagat agatcacctt atcatttctc cagcacattc |
| 19861 | caggaaggat ctcaattcgt tctgtcccaa tatacctcta catcctttgt tttgatgatc |
| 19921 | acatagaatt cattgtatgc atatatcatt atttatataa ctaagccccc aattttgaac |
| 19981 | aagaggctac atactgaaaa tcttttatct accaagtctt ttttttctta caaacccatc |
| 20041 | caatacagtt gcactgtatc cgccaataca gttcatgcaa ctgtatggaa agcaaactct |
| 20101 | agaagagtat ttgatagctc cataagaata ttaaactctt atacttctag agcgtaaaac |
| 20161 | cccagaaaag tattttgtca gaaaaaaatc atgtttttga aatagtaggt tttaaaagaa |
| 20221 | aacaaagaga gttagaagta agaaaattca ggttatcagg ggcttgatat cttttttttg |
| 20281 | tgactgtagt caggttaccc aggcctttgt ggatcaattt ctcaaacaaa taacagagat |
| 20341 | gaaaacaact gtcagtagct actgtcacaa aaataatatg ataaacatct tttcgtttcc |
| 20401 | tatggctgcc ataactaatt atcacaaact tggtggctta aaataacaga aatgtatttt |
| 20461 | ctcacagctc cagagtccag aattccaaaa tggaagggtc agcaaggctg cacgccctca |
| 20521 | aaacactctt ggagagaatc ttttcttgct tcatccagct tctgatggct ctaggcaatc |
| 20581 | ccccgcttgt cactgcatca ctcoggtctc tgcccccatc ttcaaatgac cttcctctgt |
| 20641 | gtccctgtct tctcttctgt ctcttataag gacacttgtc attgtacagt atttagggtc |
| 20701 | cacatagata atccaggagg atctcatttt aagatcctta acttcattac atctgtacag |
| 20761 | atcctttgtc caaattaagg taatgttcac aggttctgtg ggttaggatg tggacatatc |
| 20821 | attttgaggc ccaccattca atgcactaca attttctttg taagtgttct gagaacccag |
| 20881 | gaagaataag taaatcctct gattcaatca aaaatgagca gaatgtaaac caaaaatact |
| 20941 | agaagatatc ctttttccta ggcactggca tacgtttcaa tagtatctct aattacagat |
| 21001 | gtatttacac ttctaagtgt cagaaatgaa gattattatg acaaatttaa aatttagtaa |
| 21061 | cttgttttta aactggtatt tttgtttttt taagcgatca tctcagtcca cattggaacg |
| 21121 | atctgaacag cagatcaggg ctgcttctag tttggaggaa ctacttcgaa ttactcactc |
| 21181 | tgaggactgg aagcbgtgga gatgcaggct gaggctcaaa agttttacca gtatggactc |
| 21241 | tcgctcagca tcccatcggt ccactaggtt tgcggcaact ttctatgaca ttgaaacact |
| 21301 | aaaaggtagg tgtgtggatg tggagacaaa ttctttctct ttattagata gtgacaaaca |
| 21361 | cacttacttt ctccaaaagt ctgcgtaggg cagacacgtg tcagagggag aatgaaagtc |
| 21421 | ggtctttgat ttccagtatt agtgcagaat cttgattttt taatgtttac ttcacagaga |
| 21481 | aatatattca atatgatttt gagataaaaa acacaaaaga acatctcaaa atatagaaat |
| 21541 | aaatttaact caaggatgtg ggggcaaaga aaacccagga agactattgt tctcaataga |
| 21601 | aaaacaatca tcaggtttac ttagaaaata aaacctgggg attcatccac aaggagtatt |
| 21661 | ctactgccat acatacatag acaaaaacca aagatggcca ggcatggtgg ctcatgcctg |
| 21721 | taatcccagc actttgggag gccaagaacg gcagatcgct tgagcccagg agtttgaaac |
| 21781 | cagcctgggc aacatgacga gaccccatct ctacaaaaaa atagaaaaaa atagctgaac |
| 21841 | attgtggtac gtgcctgtat tcccagctac ttgggaggct gaggtgggag gatcggctga |
| 21901 | gcccaggagg tcgaggctgc agtgagccat gatcatgcta ctgcactcca gcctgggcaa |
| 21961 | cagagcaaga tcctgtctca aaaaaaccac cccctccccg aaccaataga ttaggtatag |
| 22021 | cttttttttt tatttctgca aagttgtgtg attttttagt aaaagtgaaa agtaaaagtt |
| 22081 | agacactgag ttgtaatatt gggtactggt attgctagga gaataatgaa gggagaaaat |
| 22141 | tctcaagaca aaatgatcaa aactccagac tagaaaataa cataatttga aataaggata |
| 22201 | atgatcgttc cctagtaacg tatgaagatt ctttaaaaga aaatcaggcc aggtgtggtg |
| 22261 | gatgacacct gtaatcccag cactttggga ggttgaggca ggtggatcac ctgaggtcag |
| 22321 | gagttcgaga ccagcctgac caacatggtg aaaacccatc tctactaaaa atacaaaatt |
| 22381 | agccaggcat ggcggtgcat gcctgtaatc ccaactactt gggaggctga ggcaggagaa |
| 22441 | tcacttgaac ccaggaggcg gaggttgcag tgagccaaga ttgcaccatt gcactccaac |
| 22501 | ctgggcaaca agagtgaaac tccatcttaa aaaacaaaaa aacaaaacaa aacaaaacaa |
| 22561 | aaaaacaaag aaagaaagaa agaaaaccag tgtgagtagg tactgtcata atgaataaaa |
| 22621 | tgcttgtcaa gtaaagttct gtggtttctg attaggcact taattttttg atgtcatgtc |
| 22681 | aaaacaacac aagaagctgc tacagcattg ctgatctagc attctagatt tgattaacat |
| 22741 | gattacctgg taactgacta tatatatagc ataattcaaa ttaaccacta ggccaaaact |
| 22801 | atttttttct ttctacctaa aattgtattt gttttttccc atttgtaaaa agatgttggg |
| 22861 | gttgcacaga cctctgttgt tggcbgtggg gagagctgtg catagatggg gacatattct |
| 22921 | ttggtagcac cttgggcatg agtgtgaaga ggattcttag tgttcatgtg tatgactgtg |
| 22981 | tgtctaagtg agttgatgtg gtaggaacca tagcctcgag ctcacttcag acagaaattt |
| 23041 | gaagctctag atgtttctat gtggtgaatt aatatagcct tcatgagaac aaagggttgg |
| 23101 | cacctcatct agaggtcaaa ggccttaacc agattacctg actgaaggcc tgaggtgaac |
| 23161 | ctggagctat ttcatgaaca tgaacgttac cataaaacca agactaggtg atctaaaaaa |
| 23221 | agtcaatgac attgacattt tctaaggaga aaaccattaa aatatcacgg aatttgcaaa |
| 23281 | ccctatgaat ttatctcgta atttctaggg gatcatctga agttatttac taagttagaa |
| 23341 | gcagtcaata atgaaatcag catgttacac caattagaat ttgttatcaa ctctcccttg |
| 23401 | tggatttcaa ggtaatttcc tgaggcagag cagtcctgct gggaagcagt aaagaatagt |
| 23461 | agagttatga agcctttaat cagtgatgtt ggtcataatt gcatatgatt ttgattaaaa |
| 23521 | gcttaccact ccaatttcaa aacttagttt tataaaaaga gaaaaagcaa atggaaagca |
| 23581 | acctttaagt agaattttaa attgggaata ttttcatagg ttggtttctt gttttttcaa |
| 23641 | ggattcatga ttaattatag tgaattaaat aataaccata ataatactta attgagtaat |
| 23701 | ttatctctca bitgttcagc cttcaggctt tttatataaa tattaataat cagaaatttt |
| 23761 | taaaaaggtt tcttgggggc tgggcacagt ggctcacgcc tttaatccca gcactttggg |
| 23821 | aggctgaggt gggcggatca caaggttaag agatcaagac cagcctggcc aacatggtga |
| 23881 | aactccgtct ctactaaaaa tacaaaaatt agctgggcat ggtggcgcat acctgtaatc |
| 23941 | ccagctactt gggaggctga ggcaggagaa tcgcttgaac ccaggaggtg gaggttgcag |
| 24001 | tgagccgaga tcgcgccgct gcactccagc ctggcaacag agtgagaccc cgtctcaaaa |
| 24061 | aaaaaaaaaa aagtttctca ggatagaatg ttttattatg aggaaaaaaa taaaaaaaaa |
| 24121 | caaagtttag gtagactgtg tagtataatg cagtgctcca gacaactcat attatgtttt |
| 24181 | cagtgattga agaagcaaca tatgaaaaaa attggtatta agggatgaaa aaggagaaag |
| 24241 | gaatggagaa gatgttataa gggaataatt tagggactag ggtcacatct caaatggtaa |
| 24301 | tattgtatca gtatacttca agcagacgtt ttctctattc cttctattcc cctatatggg |
| 24361 | aattcaggat aatctcagga gagttcttga aaatgcagta aaaataaagg agagtttgcc |
| 24421 | tattgttgca taacacatta ccacaaaact tagctactta aaacaatatt tatctcagtt |
| 24481 | tctgtgggcc agaaatgctg acatggccta gatcagtttt tctgcttcag atgtctctgg |
| 24541 | aggctgcagt taagatgttg gcttgggctg caggcatctt agggcacagc tgaagcagag |
| 24601 | tgtgctttca agttcagtca gctgttgttt gcaggactca attcctcaca ggctgttgga |
| 24661 | ctgagggtct tagttcctcg ctggctattg gccagaggct gcctcaagtt ccttgtcgtg |
| 24721 | tggacctttc taacatggcg gcaaactaac acaagaactg aaaaccaaac accgcatgtt |
| 24781 | ctcactcata agtgggagtt gaacaatgag aacacatata cacaaggagg ggaacatcac |
| 24841 | aaaccagggc ctgttggtgg gtggggggca aagggaggga gagcattagg acaaatacct |
| 24901 | aatgcatgcg gggcttgaaa cctagatgac gggttgacgg gtgcagcaaa ccaccgtggc |
| 24961 | acatgcatac ctgtgtaaca aacctgcacg ttctgcacat gtatcccaga acttaaagta |
| 25021 | aaataagcta aaaaaaaaaa aaaaaaaaaa agcctgcaag tggagaagga ggagagagag |
| 25081 | agagagagtg tgtgtgagaa agtgagacag agtaagaaag aagggagctt gcaataagta |
| 25141 | gaaacaagac tgcaatcttt tttaacttca tcatggaagt ggtatcccat cacttttgct |
| 25201 | gtattctctt cataagaagc aagttactag gttcagctca cacacgaggg gaaggcattt |
| 25261 | acacaagggc atgactatca ggagatgggg accactgggg gttagtttca aagctgccta |
| 25321 | ccacaagaga ttttcaccag caccacaacc ccacacataa taaataaact ctacagttcc |
| 25381 | atggcaagct acaaggaagt ctttgtgttg tctttatcat aaaattgaat ctttccccca |
| 25441 | aaacacctgt agaaaggcta tgcagcatta agtatcaaag ggtcaaaatc taatttaaaa |
| 25501 | aataaattat gagagaaaag caagtactgt tttacaagaa agtatataat ttttttattc |
| 25561 | ccataggctt ctttttttgt taccttcaaa ttaactatgg tcaaaggatt gctcattcca |
| 25621 | gtaataagaa caggcttatt tcatcattta cataaatatc agtatcgggc acttgcaaat |
| 25681 | gagaaaactc tgatttgagt aaggattagt ttcacttcaa tttccattta tgcgtttgcc |
| 25741 | aagtttaaat cctactgtag ttacttaagc aaccaacaga aacatatttc ttgatgatgc |
| 25801 | taaaacctac ctacacctgg ctttaaagca gaagaaatgc tatccagctg tatcctataa |
| 25861 | attgcttgat aaataatatt tacatgttat ttctttacac gcttctattt acttccctat |
| 25921 | taaccagctt ctccagatgt attcagtgta attatgtaca ggacatggtg ttctacctca |
| 25981 | aagggaaata aaatacttat attctacaag gtatggtata aatgggaaag agcacagaga |
| 26041 | ttggttgtaa cttctctgca aacaatcttt ggttaaagga ctgacaaaaa atatccatct |
| 26101 | agtaaaagaa acaagcagta gaaatgtgaa aatgactgtg ttcagcataa ccctggcaca |
| 26161 | tgttggcaca ccaggaccat tccacctgct agccccagtg agctttcttt ctctctgcag |
| 26221 | ttatagatga agaatggcaa agaactcagt gcagccctag agaaacgtgc gtggaggtgg |
| 26281 | ccagtgagct ggggaagagt accaacacat tcttcaagcc cccttgtgtg aacgtgttcc |
| 26341 | gatgtggtgg ctgttgcaat gaagagagcc ttatctgtat gaacaccagc acctcgtaca |
| 26401 | tttccaaaca ggtataagga catcggcaag cctgccgtct ctaaagccct gatgataata |
| 26461 | gtgttgatag ctacaacaac cttgttgcta aacactgtac taaatgcttt atgtgcataa |
| 26521 | tcgcatttaa tctttgaaac aaatcaagag ggtattttat gctcctttat agatgaggaa |
| 26581 | actgaggctc agagaggtaa cttacttatc caagtttaca cggctgataa atagcagagc |
| 26641 | tgggattcaa acccaggtct gtgggaggcc agagcctgaa ctcttatcag ttattgtctc |
| 26701 | tctgatgcta tgatgtcaag actcagaaaa ccatatggaa gttactagga caggatgtta |
| 26761 | aaaggaatga agatagctga tggcaggttc tgtgttgctc aaatggagtg attgagaaaa |
| 26821 | atttaatgaa ggttgtgggc agaattgggg aaagagggat gggacagtga agcacctgaa |
| 26881 | gctagcaaaa agggtgagat ttocccaccc ttcgactgag gagacaaggg gagggagcag |
| 26941 | ttatgggaac ccagagggaa agcggagaag agggtttctg gactggccac tgtcaactct |
| 27001 | tagcctggca gggagtaggg gcaggggctg ggagaggcaa gagggtttat agatgtagcc |
| 27061 | catggagggc agcgtcctgg ggcacagagc ctgatgggga aggaagggga gaggatggtg |
| 27121 | tctctggagg ggcaaagaga gaatatctag cacaaaagac atttggaaat aattctgcag |
| 27181 | tccccatgaa agaaataatt cagccctctt catcttataa atttcccttt gcttagtagg |
| 27241 | taagttttcc tttctctggt taccatgttt ttaataaatg tcgcatatga gagcagtagt |
| 27301 | aacaaacttg ggaaagcaat actaaaaaac tgtacatcaa actacattat ttttggtatc |
| 27361 | bittgcaaat tctttgaatg ttgatatact tatttaattg tcagtttgcc tatatggttt |
| 27421 | attctccttt taactgcaaa aagaggtagt acaagaaaat tacatgcact gaatatatcc |
| 27481 | atgttaggta attttcttaa tgctgatttg ttttgttaat agatttactt atccttaatt |
| 27541 | ttgttcctcc accctctaaa atatccttta aactgcagag tttctttttc taaattcttt |
| 27601 | tagagaatct tggagcttgt gtgtatttta acctctacta tttgacaatt aggaaaaaaa |
| 27661 | aatgacccaa gtagggctaa gcatcaattc tgagtagaaa aaaagcttgc ataacgtaag |
| 27721 | agggtttagt tcatgatcat gtgattccct agagcatagc caaaaaattg tgcaagaaga |
| 27781 | tgaagtttat gcaaagtaaa cactacaaaa acactctcac tgagactcat ggaagttcca |
| 27841 | ttacatattg agatgtcaga ataaacacaa ccttaatgga ttgcttccac ttaatagata |
| 27901 | gttgagtact ttattttgac tgctgtactc aacaaatgat taatttcata caatgtactt |
| 27961 | aagtgtaagt gtacagcagt ttttcttcca aatatgcatt tttgaacatt ttaatagtag |
| 28021 | ttttttaaaa actatctctc gccccaaagt tatggactat ttggcaaacc acctcttaga |
| 28081 | aacaaagtga acaaatgaat actctatgta gtaaggacta catggaatgg tgattgaata |
| 28141 | gacaatgcat taaaatcaac ttcaaactca tccacacatc atagaaccac tcaagaaagt |
| 28201 | tgtgtaatct ctctgtacat ctgtttcttc acctgtaaga tggggataat aaaaacccac |
| 28261 | cccataatgt tgttataagg ggtaaatgag ttaacatgaa agcacttaca acagggcctg |
| 28321 | gcctacggaa agcgtagaaa gaatgatata catgttagct ataattattt gtttgggcat |
| 28381 | gatgatcttg tatcagtcag ctattaatac acagtgctac gtaacaaaca cactaaaact |
| 28441 | cagtggttcc aaacaacaat gatttactct cacttatgta tctgaggttc agttagttta |
| 28501 | gggtggattc agcbjggctt gactctaagc tgcagtgtga gtccaagtca acttctatgt |
| 28561 | ttcccatcgc ttggaccagc aagcctgccg gattatgttc ttttcatggc tatagcataa |
| 28621 | gtttgagaaa acaagcccca taaaacatgc acagttcaaa tttgtacttc tgtcatgtct |
| 28681 | gctaacatcc cactagccaa agaaagtgac atggccaaat aaaaagtcaa gagacaggaa |
| 28741 | actatatttc ttcaatagag atggtgtgag aagggatgaa taaatagttt gaataataat |
| 28801 | ctattctaat aaaatcctaa agaaactgca tagctttaat ctcatttaac ccttacgatt |
| 28861 | tacactcaaa tttaaagcag gagcagggat taacagtacc attttacaag agtatcaatg |
| 28921 | atcaaaaagt taaaagattt gaccaaactt aaacacttca taaagttaga tgagcctgtt |
| 28981 | tagttccatt cttaatggac aacttggcta aagtcattgc cgtaaatgac aaaggcaaaa |
| 29041 | attcagacta gaacaacttt aaaaatgata tataaaatta aaaaaatata ttgtggttat |
| 29101 | ctttctctgc tgtagctctt tgagatatca gtgcctttga catcagtacc tgaattagtg |
| 29161 | ccbittaaag ttgccaatca tacaggttgt aagtgottgc caacagoccc ccgccatcca |
| 29221 | tactcaatta tcagaagatc catccagatc cctgaagaag atcggtaagc acttttgttt |
| 29281 | ttttttttat actggattat gcttattttt gccttgccaa aactgtgtgt agaggatttt |
| 29341 | tcattaatgt agagttatca atttatcttc aaattattca tattttagct tctaacctga |
| 29401 | acctactggt aataactggc aaatacatat ttttattaga tgttagatat atattgtggt |
| 29461 | aggaccaaaa cgctcagtgg tatgagcttg tcatgtctac ttgtagacac gtttgttctt |
| 29521 | aatatgcata gtctactgca ggtgtaaaac cgctgtaacc tcaaatttag cacatgttcc |
| 29581 | agaacaagca ttaaataaaa cttatttcag gcbgtttgta tatttacatc ctgaaatgag |
| 29641 | agaaaacaaa gaagattcct ggggtcattg gggagtgaca aaactagcag cacgtgagtt |
| 29701 | ttgcaacttt ctaatctttc ccccttaaga ttaccaaatg gaaaaccctt attttaaatt |
| 29761 | aaaatgactt aaaattaatt tggctttgaa attctcttga gattaatttt gtgattattt |
| 29821 | ataagacaaa cgacaaaacc aaaggtaagg atcacttatt tgaagaaaaa aaaggattta |
| 29881 | atataaagaa acaagtaaag ggtaactgaa tgaaaagatc attagttaga tacttagact |
| 29941 | ttgcaaaagt aaagcaataa atatattgtg tgagtggcaa gtaaaagagt aagctggtga |
| 30001 | ttagttaaca ttgaaccaag aagacacctc ccgcctctct ccagcagaaa agaaaacttg |
| 30061 | tagaaaagca acatttattc tcaagatgtt cctgcbgttc tggccaatgc ttttatcttt |
| 30121 | attttaaaga aaataatctt aggggccggg cacggtggct cacacctgta atcccagcag |
| 30181 | tatgggaggc tgaggcgggc agatcacgag gtcaggagat tgagaccatc ctggctaaca |
| 30241 | cggtgcaact ccgtctctac taaaaatata aaaaaaaatt agccgggtgt ggtggtgggt |
| 30301 | gcctgtagtc ccagttactt gggaggctga ggcaggagaa tggcatgaac ctgggaggtg |
| 30361 | gagcttgcag tgagccgaga tcgcgccact gcactccagc ctgggcaaca gagggagact |
| 30421 | ccgtcaaaaa aaaaagaaaa gaaaataatc ttaggaggta tgttagaaca tatttaattt |
| 30481 | tcgtaaataa actgttgaca gctataattt gcatagtttt aacatatacc ttcttaagaa |
| 30541 | gattacaatt tccaaaatta cagtttagtt tctaaacatt tccacgtaga atatttataa |
| 30601 | ttacagaatc actatctagt aagatgcagt tcataaatac aaattaagct cctttaaaat |
| 30661 | cttttttttt tttgagacgg agtttcgctc ttgttgcccc ggctggagtg caatggcgag |
| 30721 | atctojgctc actgcaacct ccgcctccca ggttcaagtg attctcctgc ctcagccttc |
| 30781 | caagtagctg ggattacagg catgtgccgc cacgcccggc taattttgta tttttcagta |
| 30841 | gagatggggt ttctccatat tagtcaggct ggtctcgaac tcccgacctc aggtgatctg |
| 30901 | cccgcctcgg actcccaaag tgctgggatt acaggcgtga gccaccgcac ctggcccgct |
| 30961 | cctttaaaat cttaactctt ctcacatcct tatcattttg tggtgagaac atttgaaatt |
| 31021 | tactctctta gcaatttgga aatataaaat acattattat tattgactat agttaccatg |
| 31081 | ctgtgcaata gatctcaaaa ccttatttct ccaaactgag tataaaaagc aaaaaataaa |
| 31141 | tttaaaaaat cttaactatt atctactcag gaatttattt aatgttccaa agttttgatt |
| 31201 | atccttgaaa gcttttaaat ctggttcatt gttttctttt cctagcbgtt cccattccaa |
| 31261 | gaaactctgt cctattgaca tgctatggga tagcaacaaa tgtaaatgtg ttttgcagga |
| 31321 | ggaaaatcca cttgctggaa cagaaggtaa tgatagtagt agtaaaataa taacagtaat |
| 31381 | aataaaagta gcaacaatag cagcaaccgt tattgagtac ttagtatgac cagacaatgt |
| 31441 | tgtaaatott gtatatgttt taactcattt aattctcaca acaaccctgt aatgtactat |
| 31501 | tgttatttct ttttttacaa ttacaaaatg ggcacaccaa gatatcgagt aatttcctca |
| 31561 | aggtcacaca gctgagagtg atagaagtgg tcagattcca gaaccctctg taccataatc |
| 31621 | atatagtaag tccatcaatg catcactctg ctttttaatc tcaaagaaaa gcccagagtg |
| 31681 | gttggagcat cctgaaacac tgaaattgaa aggggatgtt aaacttgaat gaaagctgct |
| 31741 | tcagaactaa atactagtca actgcagttt actaatttat ttgtataaaa gtctcacagg |
| 31801 | aacataaagt aattttggac ttggtttctg tcagctgcat catatgaaaa cacgccagta |
| 31861 | atttgaaaaa agaaatggag aataagagaa aatttttctg gaattagggc aaagcaaaag |
| 31921 | caaaatatgg ctattggtct aaggggagct gggagcaaaa tgagatatag tcaaattgtc |
| 31981 | attgctcata atccgtaatt ctgtgacttt gggtgatgaa catttgcttg aaaatgaatg |
| 32041 | cattttaatg tattttccag agagctttac atggttccac caaaaaaaaa aaagaaagaa |
| 32101 | aaaaaaagtc acaagtagtc atgcagtttt aaccttgctt gttttaaact ataatctata |
| 32161 | agcaagaaca gtaagggcta aactctaaga aatctgtcct ataaactgta aatagcaacc |
| 32221 | tactctccat tcttctgcct ctcagcttcc ttctaaatgt tttcacgaaa gctcagccca |
| 32281 | gagcatgtgg ggaaatttaa tatttatgtg gtttaaatgc ccatgccgat cttgaatgtt |
| 32341 | ctttacaccc ttcccaccaa gtgttcagcc atcctctacc agaacataca tcagttattt |
| 32401 | ggagactcgc catccagtga ggcagcacca aggggtgggc acactcctgt tgttatactg |
| 32461 | aaatgaaatc tctctccaga acagaccaga ctgcccaatg gaatacaata agagtcatat |
| 32521 | atgtaactca cattttacat taaaaagata aaaagaaaca agtgaaattt atcttaatat |
| 32581 | attttattta atccaatcta tccaatgtac tatcatttca acatgcaatc aatataaaaa |
| 32641 | atttatgagc tagcctacat tctttgtgct aagtctttga aatccagtgt gtgttgtaca |
| 32701 | cttacagcac atctcaattt agactctcta tttcatgccc aatagtcaca tatggcccat |
| 32761 | agctaccttg ttggacagcc cagctcaaga gcatcaactc attagttcag gttttaccct |
| 32821 | atagaaccat gtaaaacaaa tctaattctt tctccatgtg actcatgttc taaaagtgtt |
| 32881 | agaaaatttt tgtggggttg gccgggaatg gtggctcatg cctgtaatcc tagcactttg |
| 32941 | ggaggccgag atgggaggat cacttgaggt tgggagtttg aaaaccagcc gggccggccg |
| 33001 | ggcgcggtgg ctcacgcctg tagtcccagc actttgggag gccgaggcgg gcggatcacg |
| 33061 | aggtcaggag attgagacca tcctggctaa aacggtgaaa ccccgtctct actaaaaata |
| 33121 | caaaaaaaaa attagccggg cgtagtggcg ggcgcctgta gtcccagcta cttgggaggc |
| 33181 | tgaggcagga gaatggcgtg aacccgggag gcggagcttg cagtgagccg agatcccgcc |
| 33241 | actgcactcc agcctgggca acagagcgag actccgtctc aaaaaaagaa aaaaaaaaaa |
| 33301 | aagaaaacca gccgggccaa catggcgaaa tcccatctct actactacta aaaaaaaaaa |
| 33361 | aaaaaaaaaa aaaaaaaaaa aaaaaatagc tgggcatggt gatgtgcgcc tgtagtccca |
| 33421 | gctactcagg aggctgaggc atgagaatct cttgaacctg ggaggcagag gttgcagtga |
| 33481 | gccgaggtca tgccaccgca ctcgggcctg gatgacagag tgagactctg cctccaaaaa |
| 33541 | aagaaagaaa gaaagaaaga gagaaagaga aaaagaaaag aaaagaaaga gagagagaga |
| 33601 | gaaagaaaga aagaaaagaa aagaaagaga gagaaagaaa gaaagaaaag aaagaaaaag |
| 33661 | aaaggaagga aggaaggata gaaagaaaga aagagaaaga aagtaagtta ctgtgggaag |
| 33721 | ggcaatatac ttagagctta aaggctctag ctgaggattt cctggcacaa agcctctgag |
| 33781 | acagttttgt acggaggagg tttgtaggca ggcacaaggc attaaagggt aaagagagag |
| 33841 | gcagcagacc acagcgcagt tgctaagagg catcagccta agccaatggg aagttgaagc |
| 33901 | tgggaacccc tgcgggggta agtcttaaat ctaggtgaag aggctgagcc ctgtagaccg |
| 33961 | ttcattggct gccttggaga ggggatgtag ccttaggaga ggcagcttat ttctgctgga |
| 34021 | gataattctt gggaaggcac tcagccagta cacgtgtgta gagggtggta agaagaatag |
| 34081 | ggaagaagag aagtgctgtt ctaagcagcg ggtatatgag cactcagggc tggaggtgag |
| 34141 | agaacatact ggaagaagtt cagcatggtg gggatataat gggtggggac ataatgggga |
| 34201 | aggggctggt tagatgtgag agaagaagct ggacaggctc acaggggcaa agcagaagga |
| 34261 | ccttgtaatt cttgcatggg agcttggatg tgatactaag gacaaaggga aaccacacaa |
| 34321 | ctggctaaag caggagagtg acagtaccca ttagaatttt aacaaaatca tatcagcaac |
| 34381 | agtgtagaag aggatgtgtt gactcggggc agggaaggag gcaggaaacc ttttgggaag |
| 34441 | ttgtagcaat gatgtaagtg agaggcgcag ggtggactgg atcacaattg tttctcattc |
| 34501 | tcatctccta taagtcccca atgtggatca agttcacatt catttctcca gtggccccat |
| 34561 | caaattgatg ggatttactg agcttactgc tcactatact ttttttccgc acatgtgact |
| 34621 | gttaagccaa ctgccttttc tacagtgact tctcttgccc agatgagcac atttaggtta |
| 34681 | gtgaatccaa gtctaattta attgagtctt gttagagtca ggtcattgct ctaaattgtt |
| 34741 | aaaacaaacg atatacacaa acacacacac acacaaaaga ataaattgag gaggtcccaa |
| 34801 | ttctgtattt taaaatactt aatatatccc ttccttcttg aagagagcta caatttcaag |
| 34861 | aatttatttt gaaaaaattc tatcagttta ttgataaaaa tggtaaaagg aacaaagctg |
| 34921 | agaacagaac atatcatcag actctctagg gacggaaatc aatacataat acttcaagat |
| 34981 | atcaccctca gctacttgct gttccaccac cagttctctt gcatccagtt tttgtttctt |
| 35041 | ttaacttggc tataaggatg tgagcacaga ctctgccaaa cagcctgctg aagttctgca |
| 35101 | aacaccttgt ggattgtgtt tccctgaaca accctgtcca acaatggcct tgggcctgtc |
| 35161 | tgaagtattc ttagtgaact tctgctgcca cctagtgatc attgcgaatt tttaaaaagc |
| 35221 | ctctttatcc tttaacaagt tactcttgtc ttaccccaaa gcggcatctg cctcactggc |
| 35281 | atatgactta cagagctcac attttccctc tccacaaagt tcaaaatgga gacttctcag |
| 35341 | atttagcctt ccagcaccca ttctcaaacg tcgtgcatta cagaaaagtt taaactataa |
| 35401 | agttgaaccg cacgagattc tcattttgat atgtcattaa agtcagatat tggcaagaac |
| 35461 | atatggttta acccaatggc ttggaatgct ggatgggatt cccagaagct ccatacatcg |
| 35521 | gcctgcttca ggaccctttt attacaccaa ataaacccaa caaacatcca tcgagtgcct |
| 35581 | attttatatc agaacaatga gacctgctcc ttctccttca ggacatttta cttaatgggg |
| 35641 | gaaacataca agtaaacaga caaatgtaat cagtgcaaga aagaatcgga cagcaatatg |
| 35701 | cacaggataa ggacacttag ctaaacctgc agacattggg aaagatgtca gggaaaaggg |
| 35761 | atggcagaag gaaagacaag gccaaaggca tgggactggg aggcactgga atatcagggc |
| 35821 | aacagaaagt gctgtcattt ggtataaatg gaacacacag gatatatgaa agcaagaaac |
| 35881 | agaagatgag tctgtgaggt tactatgatc cagttcatgg agggccttgt atgtcctggt |
| 35941 | gggaaaattg gtttttattg tgggaaggga accttttaat gcattcaaag cagtggaatg |
| 36001 | aagtgatttg gtttgcattt gttaatcatg tgaagaagaa taggttggag ggataaaact |
| 36061 | tgtggtggtg agatgagtga cagagcgaca gccatctaca aaagaaacac aaggtacaga |
| 36121 | ctgaattgtg ggagtggtag tggggatgga aaataaagaa caaatttaga gaggcagaac |
| 36181 | tgagtggaca tgatgctcag acttaccaga gcaggtgagt caagaatgat gtcaccattc |
| 36241 | cctaaatgag gcaaactggg agagaagcag atttggggag aaaactacta aacatgtacg |
| 36301 | tccctccaaa accttcaaga atgctaaagg gacagagtca agttcttcca aagtttctgt |
| 36361 | ctcttccatt tattttgcaa tgaatttcaa cttgttaatc agaaatggat ttggagtagt |
| 36421 | agctattcaa ttgttttata caccttctag aagaaatatt tgtcagatga gtatgtcaaa |
| 36481 | aacttctcag accctcccct ttacttgaat gtatcttcca gcagatgttg gtggaatcaa |
| 36541 | agttcattat tactcctata tcttttatac tagtgttatg atctgcagtg aggacatgca |
| 36601 | ttgctattgc tacgcctggc ctggaatgtc tgaggtgtat ttctacaaca ccaattattt |
| 36661 | tgtgtgtctc tccttttaat ctccaccaaa aaatggagac agctagattc ataaccctta |
| 36721 | gacatcctat attttattac taatacttgg ttgtggaagt ttgcattcta aacaagtcat |
| 36781 | caacataaaa atctctaaaa atattttatg aaaaatattc agcttatgat attttaaaaa |
| 36841 | tcacaaacct aagaaaacac acaaacctgt gtttgtattg tgaaatcaga ggttaatctt |
| 36901 | cctcaccctg tgaaaaaatt aggggcataa atctatagga aggagattgg gtgaatccaa |
| 36961 | gttacttacg gatgacataa aagatacaat caactttggt gatccaattg ccacactaca |
| 37021 | actatctgac caacacgttt ctgtttctct ttagaccact ctcatctcca ggaaccagct |
| 37081 | ctctgtgggc cacacatgat gtttgacgaa gatcgttgcg agtgtgtctg taaaacacca |
| 37141 | tgtcccaaag atctaatcca gcaccccaaa aactgcagtt gctttgagtg caaagaaagt |
| 37201 | ctggagacct gctgccagaa gcacaagcta tttcacccag acacctgcag gtaaatgcct |
| 37261 | tgagttgtct tgcctttact catgacattt aacgtagatg ccattttaat ttggtgggat |
| 37321 | tccttagtaa gctaattttt ccccttggtg cctgagtccc ttttggataa tagaacagag |
| 37381 | gtttagcagc taaggaataa gcaagagtat accgagtcat gattaatcat gaaaataaga |
| 37441 | aaatcaatcc tgcctgttat tatgtgtgta gagctttttt tttttagacg gagtctcgct |
| 37501 | ctgtctccag gctggagtgc agtggcgtga tctgggctca ctgcaacctc cgtctctctg |
| 37561 | gttcaaggga gtctcctgcc tcagcctccc aagtagctgg gattacaggc acgtgccacc |
| 37621 | acacccagct aatttttgta tttcagtaga gacggggttt caccatgttg gccaggatag |
| 37681 | tcttgatctc ctgacctcat gatccacccg tctojgcctc ccaaagtgct gggattacag |
| 37741 | gcatgagcca ccgcgcccac cojgggttta gagctcttaa acaacaatga aattggtaaa |
| 37801 | atttaagcag ttattaggat attgcttaat aataatattt taggaagggg aggtttcaga |
| 37861 | tcatcaacct gtttagttca atctctcatt gtttatgtct atatatgttt gtttttttct |
| 37921 | ttaatggagg gaatatcatt ggatttatat agcaagtaat ttattcatga atagaacact |
| 37981 | tggaggttac tgattcactt cagtagattt tgaatccatg tgggataacc atgcaggatt |
| 38041 | ttatactgac attttaaata catgtctgga aaacttaatc aaatcagagc agagttattc |
| 38101 | ttttgaatcc agtcattgat tctgaattct catctttatt ttcttttgca acagctgtga |
| 38161 | ggacagatgc ccctttcata ccagaccatg tgcaagtggc aaaacagcat gtgcaaagca |
| 38221 | ttgccgcttt ccaaaggaga aaagggctgc ccaggggccc cacagccgaa agaatccttg |
| 38281 | attcagcgtt ccaagttocc catocctgtc atttttaaca gcatgctgct ttgccaagtt |
| 38341 | gcbgtcactg tttttttccc aggtgttaaa aaaaaaatcc attttacaca gcaccacagt |
| 38401 | gaatccagac caaccttcca ttcacaccag ctaaggagtc cctggttcat tgatggatgt |
| 38461 | cttctagctg cagatgcctc tgcgcaccaa ggaatggaga ggaggggacc catgtaatcc |
| 38521 | ttttgtttag ttttgttttt gttttttggt gaatgagaaa ggtgtgctgg tcatggaatg |
| 38581 | gcaggtgtca tatgactgat tactcagagc agatgaggaa aactgtagtc tctgagtcct |
| 38641 | ttgctaatcg caactcttgt gaattattct gattcttttt tatgcagaat ttgattcgta |
| 38701 | tgatcagtac tgactttctg attactgtcc agcttatagt cttccagttt aatgaactac |
| 38761 | catctgatgt ttcatattta agtgtattta aagaaaataa acaccattat tcaagccata |
| 38821 | taa |

[0203] In some embodiments of any of the vectors described herein, the vector includes a sequence encoding an antibody or antigen-binding antibody fragment that can bind specifically to VEGF. In some embodiments, an antibody or antigen-binding antibody fragment can include a human IgG Fc domain (e.g., SEQ ID NO: 113). In some embodiments, the sequence encoding an antibody or antigen-binding fragment can further include a sequence encoding a secretion signal sequence (e.g., SEQ ID NO: 92). In some embodiments of any of the vectors described herein, the vector comprises a sequence of a T2A peptidase (e.g., SEQ ID NO: 99).

[0204] In some embodiments, the antibody can be a humanized antibody, a chimeric antibody, or a multivalent antibody. In some embodiments, an antibody or an antigen-binding antibody fragment can be a scFv-Fc, a V_{H}H domain, a V_{NAR} domain, a (scFv)₂, a minibody, or a BiTE. In some embodiments, an antibody or an antigen-binding antibody fragment can be a DVD-Ig, and a dual-affinity re-targeting antibody (DART), a triomab, kih IgG with a common LC, a crossmab, an ortho-Fab IgG, a 2-in-1-IgG, IgG-ScFv, scFv₂-Fc, a bi-nanobody, tanden antibody, a DART-Fc, a scFv-HAS-scFv, DNL-Fab3, DAF (two-in-one or four-in-one), DutaMab, DT-IgG, knobs-in-holes common LC, knobs-in-holes assembly, charge pair antibody, Fab-arm exchange antibody, SEEDbody, Triomab, LUZ-Y, Fcab, k-body, orthogonal Fab, DVD-IgG, IgG(H)-scFv, scFv-(H)IgG, IgG(L)-scFv, scFv-(L)-IgG, IgG (L,H)-Fc, IgG(H)-V, V(H)-IgG, IgG(L)-V, V(L)-IgG, KIH IgG-scFab, 2scFv-IgG, IgG-2scFv, scFv4-Ig, Zybody, DVI-IgG, nanobody, nanobody-HSA, a diabody, a TandAb, scDiabody, scDiabody-CH3, Diabody-CH3, Triple Body, miniantibody, minibody, TriBi minibody, scFv-CH3 KIH, Fab-scFv, scFv-CH-CL-scFv, F(ab′)₂-scFV₂, scFv-KIH, Fab-scFv-Fc, tetravalent HCAb, scDiabody-Fc, diabody-Fc, tandem scFv-Fc, intrabody, dock and lock bispecific antibody, ImmTAC, HSAbody, scDiabody-HAS, tandem scFv, IgG-IgG, Cov-X-Body, and scFv1-PEG-scFv2.

[0205] Additional examples of an antibody or an antigen-binding antibody fragment include an Fv fragment, a Fab fragment, a F(ab′)₂ fragment, and a Fab′ fragment.

[0206] Additional examples of an antibody or an antigen-binding antibody fragment include an antigen-binding fragment of an IgG (e.g., an antigen-binding fragment of IgG1, IgG2, IgG3, or IgG4) (e.g., an antigen-binding fragment of a human or humanized IgG, e.g., human or humanized IgG1, IgG2, IgG3, or IgG4); an antigen-binding fragment of an IgA (e.g., an antigen-binding fragment of IgA1 or IgA2) (e.g., an antigen-binding fragment of a human or humanized IgA, e.g., a human or humanized IgA1 or IgA2); an antigen-binding fragment of an IgD (e.g., an antigen-binding fragment of a human or humanized IgD); an antigen-binding fragment of an IgE (e.g., an antigen-binding fragment of a human or humanized IgE); or an antigen-binding fragment of an IgM (e.g., an antigen-binding fragment of a human or humanized IgM).

[0207] Any of the antibodies or antigen-binding antibody fragments described herein can bind specifically to VEGF.

[0208] A V_{H}H domain is a single monomeric variable antibody domain that can be found in camelids. A V_{NAR} domain is a single monomeric variable antibody domain that can be found in cartilaginous fish. Non-limiting aspects of V_{H}H domains and V_{NAR} domains are described in, e.g., Cromie et al., Curr Top. Med. Chem. 15:2543-2557, 2016; De Genst et al., Dev. Comp. Immunol. 30:187-198, 2006; De Meyer et al., Trends Biotechnol. 32:263-270, 2014; Kijanka et al., Nanomedicine 10:161-174, 2015; Kovaleva et al., Expert. Opin. Biol. Ther 14:1527-1539, 2014; Krah et al., Immunopharmacol. Immunotoxicol. 38:21-28, 2016; Mujic-Delic et al., Trends Pharmacol. Sci. 35:247-255, 2014; Muyldermans, J. Biotechnol. 74:277-302, 2001; Muyldermans et al., Trends Biochem. Sci. 26:230-235, 2001; Muyldermans, Ann. Rev. Biochem. 82:775-797, 2013; Rahbarizadeh et al., Immunol. Invest. 40:299-338, 2011; Van Audenhove et al., EBioMedicine 8:40-48, 2016; Van Bockstaele et al., Curr Opin. Investig. Drugs 10:1212-1224, 2009; Vincke et al., Methods Mol. Biol. 911:15-26, 2012; and Wesolowski et al., Med. Microbiol. Immunol. 198:157-174, 2009.

[0209] A “Fv” fragment includes a non-covalently-linked dimer of one heavy chain variable domain and one light chain variable domain.

[0210] A “Fab” fragment includes, the constant domain of the light chain and the first constant domain (CHI) of the heavy chain, in addition to the heavy and light chain variable domains of the Fv fragment.

[0211] A “F(ab′)₂” fragment includes two Fab fragments joined, near the hinge region, by disulfide bonds.

[0212] A “dual variable domain immunoglobulin” or “DVD-Ig” refers to multivalent and multispecific binding proteins as described, e.g., in DiGiammarino et al., Methods Mol. Biol. 899:145-156, 2012; Jakob et al., MABs 5:358-363, 2013; and U.S. Pat. Nos. 7,612,181; 8,258,268; 8,586,714; 8,716,450; 8,722,855; 8,735,546; and 8,822,645, each of which is incorporated by reference in its entirety.

[0213] DARTs are described in, e.g., Garber, Nature Reviews Drug Discovery 13:799-801, 2014.

[0214] Additional aspects of antibodies and antigen-binding antibody fragments are known in the art.

[0215] In some embodiments, any of the antibodies or antigen-binding antibody fragments described herein has a dissociation constant (K_{D}) of less than 1×10⁻⁵ M (e.g., less than 0.5×10⁻⁵ M, less than 1×10⁻⁶ M, less than 0.5×10⁻⁶ M, less than 1×10⁻⁷ M, less than 0.5×10⁻⁷ M, less than 1×10⁻⁸ M, less than 0.5×10⁻⁸ M, less than 1×10⁻⁹M, less than 0.5×10⁻⁹ M, less than 1×10⁻¹⁰M, less than 0.5×10⁻¹¹ M, less than 1×10⁻¹¹ M, less than 0.5×10⁻¹¹ M, or less than 1×10⁻¹² M), e.g., as measured in phosphate buffered saline using surface plasmon resonance (SPR) for a VEGF protein (e.g., any of the VEGF proteins described herein, e.g., one or more of mature human VEGF-A, mature human VEGF-B, mature human VEGF-C, and mature human VEGF-D).

[0216] In some embodiments, any of the antibodies or antigen-binding antibody fragments described herein has a K_{D} of about 1×10⁻¹² M to about 1×10⁻⁵ M, about 0.5×10⁻⁵ M, about 1×10⁻⁶ M, about 0.5×10⁻⁶ M, about 1×10⁻⁷ M, about 0.5×10⁻⁷ M, about 1×10⁻⁸ M, about 0.5×10⁻⁸ M, about 1×10⁻⁹ M, about 0.5×10⁻⁹ M, about 1×10⁻¹⁰M, about 0.5×10⁻¹⁰M, about 1×10⁻¹¹ M, or about 0.5×10⁻¹¹ M (inclusive); about 0.5×10⁻¹¹ M to about 1×10⁻⁵ M, about 0.5×10⁻⁵ M, about 1×10⁻⁶ M, about 0.5×10⁻⁶ M, about 1×10⁻⁷ M, about 0.5×10⁻⁷ M, about 1×10⁻⁸ M, about 0.5×10⁻⁸ M, about 1×10⁻⁹ M, about 0.5×10⁻⁹ M, about 1×10⁻¹⁰M, about 0.5×10⁻¹⁰ M, or about 1×10⁻¹¹ M (inclusive); about 1×10⁻¹¹ M to about 1×10⁻⁵ M, about 0.5×10⁻⁵ M, about 1×10⁻⁶ M, about 0.5×10⁻⁶ M, about 1×10⁻⁷ M, about 0.5×10⁻⁷ M, about 1×10⁻⁸ M, about 0.5×10⁻⁸ M, about 1×10⁻⁹M, about 0.5×10⁻⁹ M, about 1×10⁻¹⁰M, or about 0.5×10⁻¹⁰M (inclusive); about 0.5×10⁻¹⁰ M to about 1×10⁻⁵ M, about 0.5×10⁻⁵ M, about 1×10⁻⁶ M, about 0.5×10⁻⁶ M, about 1×10⁻⁷ M, about 0.5×10⁻⁷ M, about 1×10⁻⁸ M, about 0.5×10⁻⁸ M, about 1×10⁻⁹ M, about 0.5×10⁻⁹ M, or about 1×10⁻¹⁰ M (inclusive); about 1×10⁻¹⁰ M to about 1×10⁻⁵ M, about 0.5×10⁻⁵ M, about 1×10⁻⁶ M, about 0.5×10⁻⁶ M, about 1×10⁻⁷ M, about 0.5×10⁻⁷ M, about 1×10⁻⁸ M, about 0.5×10⁻⁸ M, about 1×10⁻⁹ M, or about 0.5×10⁻⁹ M (inclusive); about 0.5×10⁻⁹ M to about 1×10⁻⁵ M, about 0.5×10⁻⁵ M, about 1×10⁻⁶ M, about 0.5×10⁻⁶ M, about 1×10⁻⁷ M, about 0.5×10⁻⁷ M, about 1×10⁻⁸ M, about 0.5×10⁻⁸ M, or about 1×10⁻⁹ M (inclusive); about 1×10⁻⁹ M to about 1×10⁻⁵ M, about 0.5×10⁻⁵ M, about 1×10⁻⁶ M, about 0.5×10⁻⁶ M, about 1×10⁻⁷M, about 0.5×10⁻⁷ M, about 1×10⁻⁸ M, or about 0.5×10⁻⁸ M (inclusive); about 0.5×10⁻⁸ M to about 1×10⁻⁵ M, about 0.5×10⁻⁵ M, about 1×10⁻⁶ M, about 0.5×10⁻⁶ M, about 1×10⁻⁷ M, about 0.5×10⁻⁷ M, or about 1×10⁻⁸ M (inclusive); about 1×10⁻⁸ M to about 1×10⁻⁵ M, about 0.5×10⁻⁵ M, about 1×10⁻⁶ M, about 0.5×10⁻⁶ M, about 1×10⁻⁷M, or about 0.5×10⁻⁷ M (inclusive); about 0.5×10⁻⁷ M to about 1×10⁻⁵ M, about 0.5×10⁻⁵ M, about 1×10⁻⁶ M, about 0.5×10⁻⁶ M, or about 1×10⁻⁷M (inclusive); about 1×10⁻⁷ M to about 1×10⁻⁵ M, about 0.5×10⁻⁵ M, about 1×10⁻⁶ M, or about 0.5×10⁻⁶ M (inclusive); about 0.5×10⁻⁶ M to about 1×10⁻⁵ M, about 0.5×10⁻⁵ M, or about 1×10⁻⁶ M (inclusive); about 1×10⁻⁶ M to about 1×10⁻⁵ M or about 0.5×10⁻⁵ M (inclusive); or about 0.5×10⁻⁵ M to about 1×10⁻⁵ M (inclusive), e.g., as measured in phosphate buffered saline using surface plasmon resonance (SPR), for a VEGF protein (e.g., any of the VEGF proteins described herein, e.g., one or more of mature human VEGF-A, mature human VEGF-B, mature human VEGF-C, and mature human VEGF-D).

[0217] A variety of different methods known in the art can be used to determine the K_{D} values of any of the antibodies or antigen-binding antibody fragments described herein (e.g., an electrophoretic mobility shift assay, a filter binding assay, surface plasmon resonance, and a biomolecular binding kinetics assay, etc.).

[0218] In some embodiments of any of the antibodies and/or antigen-binding antibody fragments described herein, the half-life of the antibody and/or the antigen-binding antibody fragment in a subject (e.g., a human) is decreased about 0.5-fold to about 4-fold (e.g., about 0.5-fold to about 3.5-fold, about 0.5-fold to about 3-fold, about 0.5-fold to about 2.5-fold, about 0.5-fold to about 2-fold, about 0.5-fold to about 1.5-fold, about 0.5-fold to about 1-fold, about 1-fold to about 4-fold, about 1-fold to about 3.5-fold, about 1-fold to about 3-fold, about 1-fold to about 2.5-fold, about 1-fold to about 2-fold, about 1.5-fold to about 4-fold, about 1.5-fold to about 3.5-fold, about 1.5-fold to about 3-fold, about 1.5-fold to about 2.5-fold, about 1.5-fold to about 2-fold, about 2-fold to about 4-fold, about 2-fold to about 3.5-fold, about 2-fold to about 3-fold, about 2-fold to about 2.5-fold, about 2.5-fold to about 4-fold, about 2.5-fold to about 3.5-fold, about 2.5-fold to about 3-fold, about 3-fold to about 4-fold, about 3-fold to about 3.5-fold, or about 3.5-fold to about 4-fold) as compared to the half-life of a control antibody and/or a control antigen-binding antibody fragment (e.g., any of the control antibodies and control antigen-binding antibody fragments described herein) in a similar subject. See, e.g., Leabman et al., MAbs. 5(6): 896-903, 2013. In some embodiments, an antibody or antigen-binding antibody fragment described herein has one or more amino acid substitutions in the Fc region that decrease its half-life in a mammal, and a control antibody lacks at least one (e.g., lacks all) of these one or more amino acid substiutions in the Fc region.

[0219] In some examples of any of the antibodies and antigen-binding fragments thereof described herein, the antibody and antigen-binding fragment can bind to a VEGF antigen (e.g., any of the exemplary VEGF proteins described herein, e.g., one or more of mature human VEGF-A, mature human VEGF-B, mature human VEGF-C, and mature human VEGF-D) (e.g., any of the binding affinities described herein).

[0220] In some embodiments described herein, an antibody or antigen-binding antibody fragment can decrease an activity of a VEGF (e.g., one or more of any of the exemplary VEGF proteins described herein, e.g., one or more of mature human VEGF-A, mature human VEGF-B, mature human VEGF-C, and mature human VEGF-D). In some embodiments, an antibody or antigen-binding antibody fragment can block a VEGF (e.g., one or more of any of the exemplary VEGF proteins described herein, e.g., one or more of mature human VEGF-A, mature human VEGF-B, mature human VEGF-C, and mature human VEGF-D) from binding to one or more of its receptors (e.g., one or more VEGF receptors) See, e.g., WO 1998/045331, U.S. Pat. No. 9,079,953, US 2015/0147317, US 2016/0289314, Plotkin et al., Otology & Neurotology 33: 1046-1052 (2012); and Ferrara et al. (2005) Biochem Biophys Res Commun 333(2): 328-335. In some embodiments, an antibody or antigen-binding antibody can decrease downstream signaling (e.g., signaling downstream of a VEGF receptor, e.g., one or more of any of the exemplary VEGF receptors described herein, e.g., one or more of human VEGFR-1 (SEQ ID NO: 111), human VEGFR-2 (SEQ ID NO: 112), and human VEGFR-3). In some embodiments, a decrease in an activity of a VEGF can be detected indirectly, e.g., through an increase in hearing (e.g., a 1% to about 400% increase (or any of the subranges of this range described herein) in hearing) or a decrease (e.g., a 1% to 99%, a 1% to 95%, a 1% to 90%, a 1% to 85%, a 1% to 80%, a 1% to 75%, a 1% to 70%, a 1% to 65%, a 1% to 60%, a 1% to 55%, a 1% to 50%, a 1% to 45%, a 1% to 40%, a 1% to 35%, a 1% to 30%, a 1% to 25%, a 1% to 20%, a 1% to 15%, a 1% to 10%, a 1% to 5%, a 5% to 99%, a 5% to 95%, a 5% to 90%, a 5% to 85%, a 5% to 80%, a 5% to 75%, a 5% to 70%, a 5% to 65%, a 5% to 60%, a 5% to 55%, a 5% to 50%, a 5% to 45%, a 5% to 40%, a 5% to 35%, a 5% to 30%, a 5% to 25%, a 5% to 20%, a 5% to 15%, a 5% to 10%, a 10% to 99%, a 10% to 95%, a 10% to 90%, a 10% to 85%, a 10% to 80%, a 10% to 75%, a 10% to 70%, a 10% to 65%, a 10% to 60%, a 10% to 55%, a 10% to 50%, a 10% to 45%, a 10% to 40%, a 10% to 35%, a 10% to 30%, a 10% to 25%, a 10% to 20%, a 10% to 15%, a 15% to 99%, a 15% to 95%, a 15% to 90%, a 15% to 85%, a 15% to 80%, a 15% to 75%, a 15% to 70%, a 15% to 65%, a 15% to 60%, a 15% to 55%, a 15% to 50%, a 15% to 45%, a 15% to 40%, a 15% to 35%, a 15% to 30%, a 15% to 25%, a 15% to 20%, a 20% to 99%, a 20% to 95%, a 20% to 90%, a 20% to 85%, a 20% to 80%, a 20% to 75%, a 20% to 70%, a 20% to 65%, a 20% to 60%, a 20% to 55%, a 20% to 50%, a 20% to 45%, a 20% to 40%, a 20% to 35%, a 20% to 30%, a 20% to 25%, a 25% to 99%, a 25% to 95%, a 25% to 90%, a 25% to 85%, a 25% to 80%, a 25% to 75%, a 25% to 70%, a 25% to 65%, a 25% to 60%, a 25% to 55%, a 25% to 50%, a 25% to 45%, a 25% to 40%, a 25% to 35%, a 25% to 30%, a 30% to 99%, a 30% to 95%, a 30% to 90%, a 30% to 85%, a 30% to 80%, a 30% to 75%, a 30% to 70%, a 30% to 65%, a 30% to 60%, a 30% to 55%, a 30% to 50%, a 30% to 45%, a 30% to 40%, a 30% to 35%, a 35% to 99%, a 35% to 95%, a 35% to 90%, a 35% to 85%, a 35% to 80%, a 35% to 75%, a 35% to 70%, a 35% to 65%, a 35% to 60%, a 35% to 55%, a 35% to 50%, a 35% to 45%, a 35% to 40%, a 40% to 99%, a 40% to 95%, a 40% to 90%, a 40% to 85%, a 40% to 80%, a 40% to 75%, a 40% to 70%, a 40% to 65%, a 40% to 60%, a 40% to 55%, a 40% to 50%, a 40% to 45%, a 45% to 99%, a 45% to 95%, a 45% to 90%, a 45% to 85%, a 45% to 80%, a 45% to 75%, a 45% to 70%, a 45% to 65%, a 45% to 60%, a 45% to 55%, a 45% to 50%, a 50% to 99%, a 50% to 95%, a 50% to 90%, a 50% to 85%, a 50% to 80%, a 50% to 75%, a 50% to 70%, a 50% to 65%, a 50% to 60%, a 50% to 55%, a 55% to 99%, a 55% to 95%, a 55% to 90%, a 55% to 85%, a 55% to 80%, a 55% to 75%, a 55% to 70%, a 55% to 65%, a 55% to 60%, a 60% to 99%, a 60% to 95%, a 60% to 90%, a 60% to 85%, a 60% to 80%, a 60% to 75%, a 60% to 70%, a 60% to 65%, a 65% to 99%, a 65% to 95%, a 65% to 90%, a 65% to 85%, a 65% to 80%, a 65% to 75%, a 65% to 70%, a 70% to 99%, a 70% to 95%, a 70% to 90%, a 70% to 85%, a 70% to 80%, a 70% to 75%, a 75% to 99%, a 75% to 95%, a 75% to 90%, a 75% to 85%, a 75% to 80%, a 80% to 99%, a 80% to 95%, a 80% to 90%, a 80% to 85%, a 85% to 99%, a 85% to 95%, a 85% to 90%, a 90% to 99%, a 90% to 95%, or a 95% to 99% decrease) in the size or the severity of one or more symptoms of an acoustic neuroma, vestibular schwannoma, or neurofibromatosis type II in a mammal as compared to the level of hearing or size of an acoustic neuroma, vestibular schwannoma, or neurofibromatosis type II in the mammal, respectively, before administration of any of the AAV vectors described herein. In some embodiments, a decrease in a VEGF activity can be detected in an in vitro assay.

[0221] In some embodiments, the antibody that specifically binds to a VEGF is bevacizumab (Avastatin®) (SEQ ID NO: 103) or an antigen-binding fragment thereof. Bevacizumab (full size antibody ˜150 kDa) inhibits all isoforms of VEGF-A. Bevacizumab received Food and Drug administration (FDA) approval in 2004 for colon cancer for intravenous (IV) dose of 4.0-7.5 mg/kg at 2-3 weeks (plasmatic half life 21 days), for intravetrial (IVT) dose 1.25 mg in 0.05 mL (half-life 5.6 days). Bevacizumab has a K_{D} for VEGF 165 (VEGF-A) of 58 pM. See, e.g., WO 2017/050825. The leader sequence of bevacizumab is SEQ ID NO: 104, the heavy chain variable domain of bevacizumab is SEQ ID NO: 105, the heavy chain constant region of bevacizumab is SEQ ID NO: 106, the light chain variable domain of devacizumab is SEQ ID NO: 107, and the light chain constant region of bevacizumab is SEQ ID NO: 108. An exemplary cDNA sequence encoding bevacizumab is SEQ ID NO: 109.

[0222] In some embodiments, the antibody that specifically binds to a VEGF is ranibizumab (Lucentis®) (SEQ ID NO: 95), or an antigen-binding fragment thereof. Ranibizumab (˜50 kDa) inhibits all isoforms of VEGF-A. Ranibizumab received FDA approval in 2006 for ocular use for intravenous (IV) dose of 4.0-7.5 mg/kg at 2-3 weeks (plasma half life of 0.5 days), for intravetrial (IVT) dose 0.5 mg in 0.05 ml (half-life of 3.2 days). Ranibizumab has a K_{D} for VEGF 165 (VEGF-A) of 46 pM. See, e.g., WO 2014/178078. The leader sequence of ranibizumab has a sequence of SEQ ID NO: 96, the heavy chain variable domain of ranibizumab has a sequence of SEQ ID NO: 97, the heavy chain constant region of ranibizumab has a sequence of SEQ ID NO: 98, the light chain variable domain of ranibizumab has a sequence of SEQ ID NO: 100, the light chain contant region of ranibizumab has a sequence of SEQ ID NO: 101. An exemplary cDNA sequence encoding ranibizumab is SEQ ID NO: 102.

[0223] In some embodiments, the antibody that specifically binds to VEGF is sevacizumab (APX003/SIM-BD0801), or an antigen-binding fragment thereof. In some embodiments, the antibody or antigen-binding fragment thereof that specifically binds to VEGF is aflibercept (SEQ ID NO: 110). An exemplary cDNA sequence encoding aflibercept is SEQ ID NO: 114.

[0224] In some embodiments of the antibodies that specifically bind to VEGF and antigen-binding fragments thereof described herein, the antibody or antigen-binding fragments thereof includes a variable light chain domain that is or includes a sequence that is at least 80% identical (e.g., at least 82%, at least 84%, at least 86%, at least 88%, at least 90%, at least 92%, at least 94%, at least 96%, at least 98%, or at least 99%) identical to the variable light chain domain of bevacizumab, and/or includes a variable heavy chain domain that is or includes a sequence that is at least 80% identical (e.g., at least 82%, at least 84%, at least 86%, at least 88%, at least 90%, at least 92%, at least 94%, at least 96%, at least 98%, or at least 99%) identical to the variable heavy chain domain of bevacizumab.

[0225] In some embodiments of the antibodies that specifically bind to VEGF and antigen-binding fragments thereof described herein, the antibody or antigen-binding fragments thereof includes a variable light chain domain that is or includes the variable light chain domain of bevacizumab, and/or a variable heavy chain domain that is or includes the variable heavy chain domain of bevacizumab. In some embodiments of the antibodies that specifically bind to VEGF and antigen-binding fragments thereof described herein, the antibody or antigen-binding fragments thereof includes a variable light chain domain that is or includes the sequence of variable light chain domain of bevacizumab, except that it includes one, two, three, four, five, six, seven, eight, nine, ten, eleven, twelve, thirteen, fourteen, or fifteen amino acid substitutions, and/or includes a variable heavy chain domain that is or includes the sequence of variable heavy chain of bevacizumab, except that it includes one, two, three, four, five, six, seven, eight, nine, ten, eleven, twelve, thirteen, fourteen, or fifteen amino acid substitutions. In some embodiments the first antigen-binding domain includes the three CDRs in the light chain variable domain of bevacizumab, and/or the three CDRs in the heavy chain variable domain of bevacizumab.

[0226] In some embodiments of the antibodies that specifically bind to VEGF and antigen-binding fragments thereof described herein, the antibody or antigen-binding fragments thereof includes a variable light chain domain that is or includes a sequence that is at least 80% identical (e.g., at least 82%, at least 84%, at least 86%, at least 88%, at least 90%, at least 92%, at least 94%, at least 96%, at least 98%, or at least 99%) identical to the variable light chain domain of ranibizumab, and/or includes a variable heavy chain domain that is or includes a sequence that is at least 80% identical (e.g., at least 82%, at least 84%, at least 86%, at least 88%, at least 90%, at least 92%, at least 94%, at least 96%, at least 98%, or at least 99%) identical to the variable heavy chain domain of ranibizumab.

[0227] In some embodiments of the antibodies that specifically bind to VEGF and antigen-binding fragments thereof described herein, the antibody or antigen-binding fragments thereof includes a variable light chain domain that is or includes the variable light chain domain of ranibizumab, and/or a variable heavy chain domain that is or includes the variable heavy chain domain of ranibizumab. In some embodiments of the antibodies that specifically bind to VEGF and antigen-binding fragments thereof described herein, the antibody or antigen-binding fragments thereof includes a variable light chain domain that is or includes the sequence of variable light chain domain of ranibizumab, except that it includes one, two, three, four, five, six, seven, eight, nine, ten, eleven, twelve, thirteen, fourteen, or fifteen amino acid substitutions, and/or includes a variable heavy chain domain that is or includes the sequence of variable heavy chain of ranibizumab, except that it includes one, two, three, four, five, six, seven, eight, nine, ten, eleven, twelve, thirteen, fourteen, or fifteen amino acid substitutions. In some embodiments the first antigen-binding domain includes the three CDRs in the light chain variable domain of ranibizumab, and/or the three CDRs in the heavy chain variable domain of ranibizumab.

### Vectors

[0228] The compositions provided herein include at least two (e.g., two, three, four, five, or six) nucleic acid vectors, where: each of the at least two different vectors includes a coding sequence that encodes a different portion of a target protein (e.g., a supporting cell target protein or a hair cell target protein), each of the encoded portions being at least 30 amino acids (e.g., about 30 amino acids to about 800 amino acids, about 30 amino acids to about 750 amino acids, about 30 amino acids to about 700 amino acids, about 30 amino acids to about 650 amino acids, about 30 amino acids to about 600 amino acids, about 30 amino acids to about 550 amino acids, about 30 amino acids to about 500 amino acids, about 30 amino acids to about 450 amino acids, about 30 amino acids to about 400 amino acids, about 30 amino acids to about 350 amino acids, about 30 amino acids to about 300 amino acids, about 30 amino acids to about 250 amino acids, about 30 amino acids to about 200 amino acids, about 30 amino acids to about 150 amino acids, about 30 amino acids to about 100 amino acids, about 30 amino acids to about 50 amino acids, about 50 amino acids to about 800 amino acids, about 50 amino acids to about 750 amino acids, about 50 amino acids to about 700 amino acids, about 50 amino acids to about 650 amino acids, about 50 amino acids to about 600 amino acids, about 50 amino acids to about 550 amino acids, about 50 amino acids to about 500 amino acids, about 50 amino acids to about 450 amino acids, about 50 amino acids to about 400 amino acids, about 50 amino acids to about 350 amino acids, about 50 amino acids to about 300 amino acids, about 50 amino acids to about 250 amino acids, about 50 amino acids to about 200 amino acids, about 50 amino acids to about 150 amino acids, about 50 amino acids to about 100 amino acids, about 100 amino acids to about 1600 amino acids, about 100 amino acids to about 800 amino acids, about 100 amino acids to about 750 amino acids, about 100 amino acids to about 700 amino acids, about 100 amino acids to about 650 amino acids, about 100 amino acids to about 600 amino acids, about 100 amino acids to about 550 amino acids, about 100 amino acids to about 500 amino acids, about 100 amino acids to about 450 amino acids, about 100 amino acids to about 400 amino acids, about 100 amino acids to about 350 amino acids, about 100 amino acids to about 300 amino acids, about 100 amino acids to about 250 amino acids, about 100 amino acids to about 200 amino acids, about 100 amino acids to about 150 amino acids, about 150 amino acids to about 800 amino acids, about 150 amino acids to about 750 amino acids, about 150 amino acids to about 700 amino acids, about 150 amino acids to about 650 amino acids, about 150 amino acids to about 600 amino acids, about 150 amino acids to about 550 amino acids, about 150 amino acids to about 500 amino acids, about 150 amino acids to about 450 amino acids, about 150 amino acids to about 400 amino acids, about 150 amino acids to about 350 amino acids, about 150 amino acids to about 300 amino acids, about 150 amino acids to about 250 amino acids, about 150 amino acids to about 200 amino acids, about 200 amino acids to about 800 amino acids, about 200 amino acids to about 750 amino acids, about 200 amino acids to about 700 amino acids, about 200 amino acids to about 650 amino acids, about 200 amino acids to about 600 amino acids, about 200 amino acids to about 550 amino acids, about 200 amino acids to about 500 amino acids, about 200 amino acids to about 450 amino acids, about 200 amino acids to about 400 amino acids, about 200 amino acids to about 350 amino acids, about 200 amino acids to about 300 amino acids, about 200 amino acids to about 250 amino acids, about 250 amino acids to about 800 amino acids, about 250 amino acids to about 750 amino acids, about 250 amino acids to about 700 amino acids, about 250 amino acids to about 650 amino acids, about 250 amino acids to about 600 amino acids, about 250 amino acids to about 550 amino acids, about 250 amino acids to about 500 amino acids, about 250 amino acids to about 450 amino acids, about 250 amino acids to about 400 amino acids, about 250 amino acids to about 350 amino acids, about 250 amino acids to about 300 amino acids, about 300 amino acids to about 800 amino acids, about 300 amino acids to about 750 amino acids, about 300 amino acids to about 700 amino acids, about 300 amino acids to about 650 amino acids, about 300 amino acids to about 600 amino acids, about 300 amino acids to about 550 amino acids, about 300 amino acids to about 500 amino acids, about 300 amino acids to about 450 amino acids, about 300 amino acids to about 400 amino acids, about 300 amino acids to about 350 amino acids, about 350 amino acids to about 800 amino acids, about 350 amino acids to about 750 amino acids, about 350 amino acids to about 700 amino acids, about 350 amino acids to about 650 amino acids, about 350 amino acids to about 600 amino acids, about 350 amino acids to about 550 amino acids, about 350 amino acids to about 500 amino acids, about 350 amino acids to about 450 amino acids, about 350 amino acids to about 400 amino acids, about 400 amino acids to about 800 amino acids, about 400 amino acids to about 750 amino acids, about 400 amino acids to about 700 amino acids, about 400 amino acids to about 650 amino acids, about 400 amino acids to about 600 amino acids, about 400 amino acids to about 550 amino acids, about 400 amino acids to about 500 amino acids, about 400 amino acids to about 450 amino acids, about 450 amino acids to about 800 amino acids, about 450 amino acids to about 750 amino acids, about 450 amino acids to about 700 amino acids, about 450 amino acids to about 650 amino acids, about 450 amino acids to about 600 amino acids, about 450 amino acids to about 550 amino acids, about 450 amino acids to about 500 amino acids, about 500 amino acids to about 800 amino acids, about 500 amino acids to about 750 amino acids, about 500 amino acids to about 700 amino acids, about 500 amino acids to about 650 amino acids, about 500 amino acids to about 600 amino acids, about 500 amino acids to about 550 amino acids, about 550 amino acids to about 800 amino acids, about 550 amino acids to about 750 amino acids, about 550 amino acids to about 700 amino acids, about 550 amino acids to about 650 amino acids, about 550 amino acids to about 600 amino acids, about 600 amino acids to about 800 amino acids, about 600 amino acids to about 750 amino acids, about 600 amino acids to about 700 amino acids, about 600 amino acids to about 650 amino acids, about 650 amino acids to about 800 amino acids, about 650 amino acids to about 750 amino acids, about 650 amino acids to about 700 amino acids, about 700 amino acids to about 800 amino acids, about 700 amino acids to about 750 amino acids, or about 750 amino acids to about 800 amino acids), where the amino acid sequence of each of the encoded portions may optionally partially overlap with the amino acid sequence of a different one of the encoded portions; no single vector of the at least two different vectors encodes the active target protein (e.g., an active supporting cell target protein (e.g., a full-length supporting cell target protein (e.g., a full-length wildtype supporting cell target protein)) or an active hair cell target protein (e.g., a full-length hair cell target protein (e.g., a full-length wildtype hair cell target protein)); and, when introduced into a primate cell, the at least two different vectors undergo homologous recombination with each other, where the recombined nucleic acid encodes an active target protein (e.g., an active supporting cell target protein (e.g., a full-length supporting cell target protein) or an active hair cell target protein (e.g., a full-length hair cell target protein). In some embodiments, one of the nucleic acid vectors can include a coding sequence that encodes a portion of a target protein (e.g., a supporting cell target protein or a hair cell target protein), where the encoded portion is, e.g., about 30 amino acids to about 800 amino acids, about 30 amino acids to about 750 amino acids, about 30 amino acids to about 700 amino acids, about 30 amino acids to about 650 amino acids, about 30 amino acids to about 600 amino acids, about 30 amino acids to about 550 amino acids, about 30 amino acids to about 500 amino acids, about 30 amino acids to about 450 amino acids, about 30 amino acids to about 400 amino acids, about 30 amino acids to about 350 amino acids, about 30 amino acids to about 300 amino acids, about 30 amino acids to about 250 amino acids, about 30 amino acids to about 200 amino acids, about 30 amino acids to about 150 amino acids, about 30 amino acids to about 100 amino acids, about 30 amino acids to about 50 amino acids, about 50 amino acids to about 800 amino acids, about 50 amino acids to about 750 amino acids, about 50 amino acids to about 700 amino acids, about 50 amino acids to about 650 amino acids, about 50 amino acids to about 600 amino acids, about 50 amino acids to about 550 amino acids, about 50 amino acids to about 500 amino acids, about 50 amino acids to about 450 amino acids, about 50 amino acids to about 400 amino acids, about 50 amino acids to about 350 amino acids, about 50 amino acids to about 300 amino acids, about 50 amino acids to about 250 amino acids, about 50 amino acids to about 200 amino acids, about 50 amino acids to about 150 amino acids, about 50 amino acids to about 100 amino acids, about 100 amino acids to about 1600 amino acids, about 100 amino acids to about 800 amino acids, about 100 amino acids to about 750 amino acids, about 100 amino acids to about 700 amino acids, about 100 amino acids to about 650 amino acids, about 100 amino acids to about 600 amino acids, about 100 amino acids to about 550 amino acids, about 100 amino acids to about 500 amino acids, about 100 amino acids to about 450 amino acids, about 100 amino acids to about 400 amino acids, about 100 amino acids to about 350 amino acids, about 100 amino acids to about 300 amino acids, about 100 amino acids to about 250 amino acids, about 100 amino acids to about 200 amino acids, about 100 amino acids to about 150 amino acids, about 150 amino acids to about 800 amino acids, about 150 amino acids to about 750 amino acids, about 150 amino acids to about 700 amino acids, about 150 amino acids to about 650 amino acids, about 150 amino acids to about 600 amino acids, about 150 amino acids to about 550 amino acids, about 150 amino acids to about 500 amino acids, about 150 amino acids to about 450 amino acids, about 150 amino acids to about 400 amino acids, about 150 amino acids to about 350 amino acids, about 150 amino acids to about 300 amino acids, about 150 amino acids to about 250 amino acids, about 150 amino acids to about 200 amino acids, about 200 amino acids to about 800 amino acids, about 200 amino acids to about 750 amino acids, about 200 amino acids to about 700 amino acids, about 200 amino acids to about 650 amino acids, about 200 amino acids to about 600 amino acids, about 200 amino acids to about 550 amino acids, about 200 amino acids to about 500 amino acids, about 200 amino acids to about 450 amino acids, about 200 amino acids to about 400 amino acids, about 200 amino acids to about 350 amino acids, about 200 amino acids to about 300 amino acids, about 200 amino acids to about 250 amino acids, about 250 amino acids to about 800 amino acids, about 250 amino acids to about 750 amino acids, about 250 amino acids to about 700 amino acids, about 250 amino acids to about 650 amino acids, about 250 amino acids to about 600 amino acids, about 250 amino acids to about 550 amino acids, about 250 amino acids to about 500 amino acids, about 250 amino acids to about 450 amino acids, about 250 amino acids to about 400 amino acids, about 250 amino acids to about 350 amino acids, about 250 amino acids to about 300 amino acids, about 300 amino acids to about 800 amino acids, about 300 amino acids to about 750 amino acids, about 300 amino acids to about 700 amino acids, about 300 amino acids to about 650 amino acids, about 300 amino acids to about 600 amino acids, about 300 amino acids to about 550 amino acids, about 300 amino acids to about 500 amino acids, about 300 amino acids to about 450 amino acids, about 300 amino acids to about 400 amino acids, about 300 amino acids to about 350 amino acids, about 350 amino acids to about 800 amino acids, about 350 amino acids to about 750 amino acids, about 350 amino acids to about 700 amino acids, about 350 amino acids to about 650 amino acids, about 350 amino acids to about 600 amino acids, about 350 amino acids to about 550 amino acids, about 350 amino acids to about 500 amino acids, about 350 amino acids to about 450 amino acids, about 350 amino acids to about 400 amino acids, about 400 amino acids to about 800 amino acids, about 400 amino acids to about 750 amino acids, about 400 amino acids to about 700 amino acids, about 400 amino acids to about 650 amino acids, about 400 amino acids to about 600 amino acids, about 400 amino acids to about 550 amino acids, about 400 amino acids to about 500 amino acids, about 400 amino acids to about 450 amino acids, about 450 amino acids to about 800 amino acids, about 450 amino acids to about 750 amino acids, about 450 amino acids to about 700 amino acids, about 450 amino acids to about 650 amino acids, about 450 amino acids to about 600 amino acids, about 450 amino acids to about 550 amino acids, about 450 amino acids to about 500 amino acids, about 500 amino acids to about 800 amino acids, about 500 amino acids to about 750 amino acids, about 500 amino acids to about 700 amino acids, about 500 amino acids to about 650 amino acids, about 500 amino acids to about 600 amino acids, about 500 amino acids to about 550 amino acids, about 550 amino acids to about 800 amino acids, about 550 amino acids to about 750 amino acids, about 550 amino acids to about 700 amino acids, about 550 amino acids to about 650 amino acids, about 550 amino acids to about 600 amino acids, about 600 amino acids to about 800 amino acids, about 600 amino acids to about 750 amino acids, about 600 amino acids to about 700 amino acids, about 600 amino acids to about 650 amino acids, about 650 amino acids to about 800 amino acids, about 650 amino acids to about 750 amino acids, about 650 amino acids to about 700 amino acids, about 700 amino acids to about 800 amino acids, about 700 amino acids to about 750 amino acids, or about 750 amino acids to about 800 amino acids in length.

[0229] In some embodiments of these compositions, at least one of the coding sequences includes a nucleotide sequence spanning two neighboring exons of target genomic DNA (e.g., supporting cell target genomic DNA or hair cell target genomic DNA), and lacks the intronic sequence that naturally occurs between the two neighboring exons.

[0230] In some embodiments, the amino acid sequence of none of the encoded portions overlaps even in part with the amino acid sequence of a different one of the encoded portions. In some embodiments, the amino acid sequence of one or more of the encoded portions partially overlaps with the amino acid sequence of a different one of the encoded portions. In some embodiments, the amino acid sequence of each of the encoded portions partially overlaps with the amino acid sequence of a different one of the encoded portions.

[0231] In some embodiments, the overlapping amino acid sequence is between about 30 amino acid residues to about 800 amino acids (e.g., or any of the subranges of this range described herein) in length.

[0232] In some examples, the vectors include two different vectors, each of which includes a different segment of an intron, where the intron includes the nucleotide sequence of an intron that is present in a target genomic DNA (e.g., a supporting cell target genomic DNA (e.g., SLC26A4 genomic DNA or a GJB2 genomic DNA) (e.g., any of the exemplary introns in SEQ ID NO: 3 described herein) or a hair cell target genomic DNA (e.g., an OTOF genomic DNA, a TRIOBP genomic DNA, a PJVK genomic DNA, a NDP genomic DNA, a CLRN1 genomic DNA, a TMC1 genomic DNA, a VEGF genomic DNA, a HSPA1A genomic DNA, or a STRC genomic DNA (e.g., any of the exemplary introns in SEQ ID NO: 19, SEQ ID NO: 22, SEQ ID NO: 33, SEQ ID NO: 37, SEQ ID NO: 47, SEQ ID NO: 50, SEQ ID NO: 61, SEQ ID NO: 71 or SEQ ID NO: 80 described herein), and where the two different segments overlap in sequence by at least 100 nucleotides (e.g., about 100 nucleotides to about 3,000 nucleotides, about 100 nucleotides to about 2,500 nucleotides, about 100 nucleotides to about 2,000 nucleotides, about 100 nucleotides to about 1,500 nucleotides, about 100 nucleotides to about 1,000 nucleotides, about 100 nucleotides to about 800 nucleotides, about 100 nucleotides to about 600 nucleotides, about 100 nucleotides to about 400 nucleotides, about 100 nucleotides to about 200 nucleotides, about 200 nucleotides to about 3,000 nucleotides, about 200 nucleotides to about 2,500 nucleotides, about 200 nucleotides to about 2,000 nucleotides, about 200 nucleotides to about 1,500 nucleotides, about 200 nucleotides to about 1,000 nucleotides, about 200 nucleotides to about 800 nucleotides, about 200 nucleotides to about 600 nucleotides, about 200 nucleotides to about 400 nucleotides, about 400 nucleotides to about 3,000 nucleotides, about 400 nucleotides to about 2,500 nucleotides, about 400 nucleotides to about 2,000 nucleotides, about 400 nucleotides to about 1,500 nucleotides, about 400 nucleotides to about 1,000 nucleotides, about 400 nucleotides to about 800 nucleotides, about 400 nucleotides to about 600 nucleotides, about 600 nucleotides to about 3,000 nucleotides, about 600 nucleotides to about 2,500 nucleotides, about 600 nucleotides to about 2,000 nucleotides, about 600 nucleotides to about 1,500 nucleotides, about 600 nucleotides to about 1,000 nucleotides, about 600 nucleotides to about 800 nucleotides, about 800 nucleotides to about 3,000 nucleotides, about 800 nucleotides to about 2,500 nucleotides, about 800 nucleotides to about 2,000 nucleotides, about 800 nucleotides to about 1,500 nucleotides, about 800 nucleotides to about 1,000 nucleotides, about 1,000 nucleotides to about 3,000 nucleotides, about 1,000 nucleotides to about 2,500 nucleotides, about 1,000 nucleotides to about 2,000 nucleotides, about 1,000 nucleotides to about 1,500 nucleotides, about 1,500 nucleotides to about 3,000 nucleotides, about 1,500 nucleotides to about 2,500 nucleotides, about 1,500 nucleotides to about 2,000 nucleotides, about 2,000 nucleotides to about 3,000 nucleotides, about 2,000 nucleotides to about 2,500 nucleotides, or about 2,500 nucleotides to about 3,000 nucleotides), in length.

[0233] The overlapping nucleotide sequence in any two of the different vectors can include part or all of one or more exons of a target gene (e.g., a supporting cell target gene (e.g., a SLC26A4 gene or a GJB2 gene) (e.g., any one or more of the exemplary exons in SEQ ID NO: 3 described herein) or a hair cell target gene (e.g., an OTOF gene, a TRIOBP gene, a PJVK gene, a NDP gene, a CLRN1 gene, a TMC1 gene, or a STRC gene) (e.g., any one or more of the exemplary exons in SEQ ID NO: 19, SEQ ID NO: 22, SEQ ID NO: 33, SEQ ID NO: 37, SEQ ID NO: 47, SEQ ID NO: 50, SEQ ID NO: 63, SEQ ID NO: 71 or SEQ ID NO: 80 described herein).

[0234] In some embodiments, the number of different vectors in the composition is two, three, four, or five. In compositions where the number of different vectors in the composition is two, the first of the two different vectors can include a coding sequence that encodes an N-terminal portion of the target protein (e.g., an N-terminal portion of the supporting cell target protein or an N-terminal portion of the hair cell target protein). In some examples, the N-terminal portion of the target gene (e.g., the N-terminal portion of the supporting cell target gene or the N-terminal portion of the hair cell target gene) is between about 30 amino acids to about 800 amino acids (e.g., between about 30 amino acids to about 790 amino acids, between about 30 amino acids to about 780 amino acids, between about 30 amino acids to about 770 amino acids, between about 30 amino acids to about 760 amino acids, between about 30 amino acids to about 750 amino acids, between about 30 amino acids to about 740 amino acids, between about 30 amino acids to about 730 amino acids, between about 30 amino acids to about 720 amino acids, between about 30 amino acids to about 710 amino acids, between about 30 amino acids to about 700 amino acids, between about 30 amino acids to about 690 amino acids, between about 30 amino acids to about 680 amino acids, between 30 amino acids to about 670 amino acids, between about 30 amino acids to about 660 amino acids, between about 30 amino acids to about 650 amino acids, between about 30 amino acids to about 640 amino acids, between about 30 amino acids to about 630 amino acids, between about 30 amino acids to about 620 amino acids, between about 30 amino acids to about 610 amino acids, between about 30 amino acids to about 600 amino acids, between about 30 amino acids to about 590 amino acids, between about 30 amino acids to about 580 amino acids, between about 30 amino acids to about 570 amino acids, between about 30 amino acids to about 560 amino acids, between about 30 amino acids to about 550 amino acids, between about 30 amino acids to about 540 amino acids, between about 30 amino acids to about 530 amino acids, between about 30 amino acids to about 520 amino acids, between about 30 amino acids to about 510 amino acids, between about 30 amino acids to about 500 amino acids, between about 30 amino acids to about 490 amino acids, between about 30 amino acids to about 480 amino acids, between about 30 amino acids to about 470 amino acids, between about 30 amino acids to about 460 amino acids, between about 30 amino acids to about 450 amino acids, between about 30 amino acids to about 440 amino acids, between about 30 amino acids to about 430 amino acids, between about 30 amino acids to about 420 amino acids, between about 30 amino acids to about 410 amino acids, between about 30 amino acids to about 400 amino acids, between about 30 amino acids to about 390 amino acids, between about 30 amino acids to about 380 amino acids, between about 30 amino acids to about 370 amino acids, between about 30 amino acids to about 360 amino acids, between about 30 amino acids to about 350 amino acids, between about 30 amino acids to about 340 amino acids, between about 30 amino acids to about 330 amino acids, between about 30 amino acids to about 320 amino acids, between about 30 amino acids to about 310 amino acids, between about 30 amino acids to about 300 amino acids, between about 30 amino acids to about 290 amino acids, between about 30 amino acids to about 280 amino acids, between about 30 amino acids to about 270 amino acids, between about 30 amino acids to about 260 amino acids, between about 30 amino acids to about 250 amino acids, between about 30 amino acids to about 240 amino acids, between about 30 amino acids to about 230 amino acids, between about 30 amino acids to about 220 amino acids, between about 30 amino acids to about 210 amino acids, between about 30 amino acids to about 200 amino acids, between about 30 amino acids to about 190 amino acids, between about 30 amino acids to about 180 amino acids, between about 30 amino acids to about 170 amino acids, between about 30 amino acids to about 160 amino acids, between about 30 amino acids to about 150 amino acids, between about 30 amino acids to about 140 amino acids, between about 30 amino acids to about 130 amino acids, between about 30 amino acids to about 120 amino acids, between about 30 amino acids to about 110 amino acids, between about 30 amino acids to about 100 amino acids, between about 30 amino acids to about 90 amino acids, between about 30 amino acids to about 80 amino acids, between about 30 amino acids to about 70 amino acids, between about 30 amino acids to about 60 amino acids, between about 30 amino acids to about 50 amino acids, between about 30 amino acids to about 40 amino acids, between about 50 amino acids to about 800 amino acids, between about 50 amino acids to about 790 amino acids, between about 50 amino acids to about 780 amino acids, between about 50 amino acids to about 770 amino acids, between about 50 amino acids to about 760 amino acids, between about 50 amino acids to about 750 amino acids, between about 50 amino acids to about 740 amino acids, between about 50 amino acids to about 730 amino acids, between about 50 amino acids to about 720 amino acids, between about 50 amino acids to about 710 amino acids, between about 50 amino acids to about 700 amino acids, between about 50 amino acids to about 690 amino acids, between about 50 amino acids to about 680 amino acids, between 30 amino acids to about 670 amino acids, between about 50 amino acids to about 660 amino acids, between about 50 amino acids to about 650 amino acids, between about 50 amino acids to about 640 amino acids, between about 30 amino acids to about 630 amino acids, between about 50 amino acids to about 620 amino acids, between about 50 amino acids to about 610 amino acids, between about 50 amino acids to about 600 amino acids, between about 50 amino acids to about 590 amino acids, between about 50 amino acids to about 580 amino acids, between about 50 amino acids to about 570 amino acids, between about 50 amino acids to about 560 amino acids, between about 50 amino acids to about 550 amino acids, between about 50 amino acids to about 540 amino acids, between about 50 amino acids to about 530 amino acids, between about 50 amino acids to about 520 amino acids, between about 50 amino acids to about 510 amino acids, between about 50 amino acids to about 500 amino acids, between about 50 amino acids to about 490 amino acids, between about 50 amino acids to about 480 amino acids, between about 50 amino acids to about 470 amino acids, between about 50 amino acids to about 460 amino acids, between about 50 amino acids to about 450 amino acids, between about 50 amino acids to about 440 amino acids, between about 50 amino acids to about 430 amino acids, between about 50 amino acids to about 420 amino acids, between about 50 amino acids to about 410 amino acids, between about 50 amino acids to about 400 amino acids, between about 50 amino acids to about 390 amino acids, between about 50 amino acids to about 380 amino acids, between about 50 amino acids to about 370 amino acids, between about 50 amino acids to about 360 amino acids, between about 50 amino acids to about 350 amino acids, between about 50 amino acids to about 340 amino acids, between about 50 amino acids to about 330 amino acids, between about 50 amino acids to about 320 amino acids, between about 50 amino acids to about 310 amino acids, between about 50 amino acids to about 300 amino acids, between about 50 amino acids to about 290 amino acids, between about 50 amino acids to about 280 amino acids, between about 50 amino acids to about 270 amino acids, between about 50 amino acids to about 260 amino acids, between about 50 amino acids to about 250 amino acids, between about 50 amino acids to about 240 amino acids, between about 50 amino acids to about 230 amino acids, between about 50 amino acids to about 220 amino acids, between about 50 amino acids to about 210 amino acids, between about 50 amino acids to about 200 amino acids, between about 50 amino acids to about 190 amino acids, between about 50 amino acids to about 180 amino acids, between about 50 amino acids to about 170 amino acids, between about 50 amino acids to about 160 amino acids, between about 50 amino acids to about 150 amino acids, between about 50 amino acids to about 140 amino acids, between about 50 amino acids to about 130 amino acids, between about 50 amino acids to about 120 amino acids, between about 50 amino acids to about 110 amino acids, between about 50 amino acids to about 100 amino acids, between about 50 amino acids to about 90 amino acids, between about 50 amino acids to about 80 amino acids, between about 50 amino acids to about 70 amino acids, between about 50 amino acids to about 60 amino acids, between about 80 amino acids to about 800 amino acids, between about 80 amino acids to about 790 amino acids, between about 80 amino acids to about 780 amino acids, between about 80 amino acids to about 770 amino acids, between about 80 amino acids to about 760 amino acids, between about 80 amino acids to about 750 amino acids, between about 80 amino acids to about 740 amino acids, between about 80 amino acids to about 730 amino acids, between about 80 amino acids to about 720 amino acids, between about 80 amino acids to about 710 amino acids, between about 80 amino acids to about 700 amino acids, between about 80 amino acids to about 690 amino acids, between about 80 amino acids to about 680 amino acids, between 30 amino acids to about 670 amino acids, between about 80 amino acids to about 660 amino acids, between about 80 amino acids to about 650 amino acids, between about 80 amino acids to about 640 amino acids, between about 30 amino acids to about 630 amino acids, between about 80 amino acids to about 620 amino acids, between about 80 amino acids to about 610 amino acids, between about 80 amino acids to about 600 amino acids, between about 80 amino acids to about 590 amino acids, between about 80 amino acids to about 580 amino acids, between about 80 amino acids to about 570 amino acids, between about 80 amino acids to about 560 amino acids, between about 80 amino acids to about 550 amino acids, between about 80 amino acids to about 540 amino acids, between about 80 amino acids to about 530 amino acids, between about 80 amino acids to about 520 amino acids, between about 80 amino acids to about 510 amino acids, between about 80 amino acids to about 500 amino acids, between about 80 amino acids to about 490 amino acids, between about 80 amino acids to about 480 amino acids, between about 80 amino acids to about 470 amino acids, between about 80 amino acids to about 460 amino acids, between about 80 amino acids to about 450 amino acids, between about 80 amino acids to about 440 amino acids, between about 80 amino acids to about 430 amino acids, between about 80 amino acids to about 420 amino acids, between about 80 amino acids to about 410 amino acids, between about 80 amino acids to about 400 amino acids, between about 80 amino acids to about 390 amino acids, between about 80 amino acids to about 380 amino acids, between about 80 amino acids to about 370 amino acids, between about 80 amino acids to about 360 amino acids, between about 80 amino acids to about 350 amino acids, between about 80 amino acids to about 340 amino acids, between about 80 amino acids to about 330 amino acids, between about 80 amino acids to about 320 amino acids, between about 80 amino acids to about 310 amino acids, between about 80 amino acids to about 300 amino acids, between about 80 amino acids to about 290 amino acids, between about 80 amino acids to about 280 amino acids, between about 80 amino acids to about 270 amino acids, between about 80 amino acids to about 260 amino acids, between about 80 amino acids to about 250 amino acids, between about 80 amino acids to about 240 amino acids, between about 80 amino acids to about 230 amino acids, between about 80 amino acids to about 220 amino acids, between about 80 amino acids to about 210 amino acids, between about 80 amino acids to about 200 amino acids, between about 80 amino acids to about 190 amino acids, between about 80 amino acids to about 180 amino acids, between about 80 amino acids to about 170 amino acids, between about 80 amino acids to about 160 amino acids, between about 80 amino acids to about 150 amino acids, between about 80 amino acids to about 140 amino acids, between about 80 amino acids to about 130 amino acids, between about 80 amino acids to about 120 amino acids, between about 80 amino acids to about 110 amino acids, between about 80 amino acids to about 100 amino acids, between about 100 amino acids to about 800 amino acids, between about 100 amino acids to about 790 amino acids, between about 100 amino acids to about 780 amino acids, between about 100 amino acids to about 770 amino acids, between about 100 amino acids to about 760 amino acids, between about 100 amino acids to about 750 amino acids, between about 100 amino acids to about 740 amino acids, between about 100 amino acids to about 730 amino acids, between about 100 amino acids to about 720 amino acids, between about 100 amino acids to about 710 amino acids, between about 100 amino acids to about 700 amino acids, between about 100 amino acids to about 690 amino acids, between about 100 amino acids to about 680 amino acids, between 30 amino acids to about 670 amino acids, between about 100 amino acids to about 660 amino acids, between about 100 amino acids to about 650 amino acids, between about 100 amino acids to about 640 amino acids, between about 30 amino acids to about 630 amino acids, between about 100 amino acids to about 620 amino acids, between about 100 amino acids to about 610 amino acids, between about 100 amino acids to about 600 amino acids, between about 100 amino acids to about 590 amino acids, between about 100 amino acids to about 580 amino acids, between about 100 amino acids to about 570 amino acids, between about 100 amino acids to about 560 amino acids, between about 100 amino acids to about 550 amino acids, between about 100 amino acids to about 540 amino acids, between about 100 amino acids to about 530 amino acids, between about 100 amino acids to about 520 amino acids, between about 100 amino acids to about 510 amino acids, between about 100 amino acids to about 500 amino acids, between about 100 amino acids to about 490 amino acids, between about 100 amino acids to about 480 amino acids, between about 100 amino acids to about 470 amino acids, between about 100 amino acids to about 460 amino acids, between about 100 amino acids to about 450 amino acids, between about 100 amino acids to about 440 amino acids, between about 100 amino acids to about 430 amino acids, between about 100 amino acids to about 420 amino acids, between about 100 amino acids to about 410 amino acids, between about 100 amino acids to about 400 amino acids, between about 100 amino acids to about 390 amino acids, between about 100 amino acids to about 380 amino acids, between about 100 amino acids to about 370 amino acids, between about 100 amino acids to about 360 amino acids, between about 100 amino acids to about 350 amino acids, between about 100 amino acids to about 340 amino acids, between about 100 amino acids to about 330 amino acids, between about 100 amino acids to about 320 amino acids, between about 100 amino acids to about 310 amino acids, between about 100 amino acids to about 300 amino acids, between about 100 amino acids to about 290 amino acids, between about 100 amino acids to about 280 amino acids, between about 100 amino acids to about 270 amino acids, between about 100 amino acids to about 260 amino acids, between about 100 amino acids to about 250 amino acids, between about 100 amino acids to about 240 amino acids, between about 100 amino acids to about 230 amino acids, between about 100 amino acids to about 220 amino acids, between about 100 amino acids to about 210 amino acids, between about 100 amino acids to about 200 amino acids, between about 100 amino acids to about 190 amino acids, between about 100 amino acids to about 180 amino acids, between about 100 amino acids to about 170 amino acids, between about 100 amino acids to about 160 amino acids, between about 100 amino acids to about 150 amino acids, between about 100 amino acids to about 140 amino acids, between about 100 amino acids to about 130 amino acids, between about 100 amino acids to about 120 amino acids, between about 100 amino acids to about 110 amino acids, between about 120 amino acids to about 800 amino acids, between about 120 amino acids to about 790 amino acids, between about 120 amino acids to about 780 amino acids, between about 120 amino acids to about 770 amino acids, between about 120 amino acids to about 760 amino acids, between about 120 amino acids to about 750 amino acids, between about 120 amino acids to about 740 amino acids, between about 120 amino acids to about 730 amino acids, between about 120 amino acids to about 720 amino acids, between about 120 amino acids to about 710 amino acids, between about 120 amino acids to about 700 amino acids, between about 120 amino acids to about 690 amino acids, between about 120 amino acids to about 680 amino acids, between 30 amino acids to about 670 amino acids, between about 120 amino acids to about 660 amino acids, between about 120 amino acids to about 650 amino acids, between about 120 amino acids to about 640 amino acids, between about 30 amino acids to about 630 amino acids, between about 120 amino acids to about 620 amino acids, between about 120 amino acids to about 610 amino acids, between about 120 amino acids to about 600 amino acids, between about 120 amino acids to about 590 amino acids, between about 120 amino acids to about 580 amino acids, between about 120 amino acids to about 570 amino acids, between about 120 amino acids to about 560 amino acids, between about 120 amino acids to about 550 amino acids, between about 120 amino acids to about 540 amino acids, between about 120 amino acids to about 530 amino acids, between about 120 amino acids to about 520 amino acids, between about 120 amino acids to about 510 amino acids, between about 120 amino acids to about 500 amino acids, between about 120 amino acids to about 490 amino acids, between about 120 amino acids to about 480 amino acids, between about 120 amino acids to about 470 amino acids, between about 120 amino acids to about 460 amino acids, between about 120 amino acids to about 450 amino acids, between about 120 amino acids to about 440 amino acids, between about 120 amino acids to about 430 amino acids, between about 120 amino acids to about 420 amino acids, between about 120 amino acids to about 410 amino acids, between about 120 amino acids to about 400 amino acids, between about 120 amino acids to about 390 amino acids, between about 120 amino acids to about 380 amino acids, between about 120 amino acids to about 370 amino acids, between about 120 amino acids to about 360 amino acids, between about 120 amino acids to about 350 amino acids, between about 120 amino acids to about 340 amino acids, between about 120 amino acids to about 330 amino acids, between about 120 amino acids to about 320 amino acids, between about 120 amino acids to about 310 amino acids, between about 120 amino acids to about 300 amino acids, between about 120 amino acids to about 290 amino acids, between about 120 amino acids to about 280 amino acids, between about 120 amino acids to about 270 amino acids, between about 120 amino acids to about 260 amino acids, between about 120 amino acids to about 250 amino acids, between about 120 amino acids to about 240 amino acids, between about 120 amino acids to about 230 amino acids, between about 120 amino acids to about 220 amino acids, between about 120 amino acids to about 210 amino acids, between about 120 amino acids to about 200 amino acids, between about 120 amino acids to about 190 amino acids, between about 120 amino acids to about 180 amino acids, between about 120 amino acids to about 170 amino acids, between about 120 amino acids to about 160 amino acids, between about 120 amino acids to about 150 amino acids, between about 120 amino acids to about 140 amino acids, between about 120 amino acids to about 130 amino acids, between about 150 amino acids to about 800 amino acids, between about 150 amino acids to about 790 amino acids, between about 150 amino acids to about 780 amino acids, between about 150 amino acids to about 770 amino acids, between about 150 amino acids to about 760 amino acids, between about 150 amino acids to about 750 amino acids, between about 150 amino acids to about 740 amino acids, between about 150 amino acids to about 730 amino acids, between about 150 amino acids to about 720 amino acids, between about 150 amino acids to about 710 amino acids, between about 150 amino acids to about 700 amino acids, between about 150 amino acids to about 690 amino acids, between about 150 amino acids to about 680 amino acids, between 30 amino acids to about 670 amino acids, between about 150 amino acids to about 660 amino acids, between about 150 amino acids to about 650 amino acids, between about 150 amino acids to about 640 amino acids, between about 30 amino acids to about 630 amino acids, between about 150 amino acids to about 620 amino acids, between about 150 amino acids to about 610 amino acids, between about 150 amino acids to about 600 amino acids, between about 150 amino acids to about 590 amino acids, between about 150 amino acids to about 580 amino acids, between about 150 amino acids to about 570 amino acids, between about 150 amino acids to about 560 amino acids, between about 150 amino acids to about 550 amino acids, between about 150 amino acids to about 540 amino acids, between about 150 amino acids to about 530 amino acids, between about 150 amino acids to about 520 amino acids, between about 150 amino acids to about 510 amino acids, between about 150 amino acids to about 500 amino acids, between about 150 amino acids to about 490 amino acids, between about 150 amino acids to about 480 amino acids, between about 150 amino acids to about 470 amino acids, between about 150 amino acids to about 460 amino acids, between about 150 amino acids to about 450 amino acids, between about 150 amino acids to about 440 amino acids, between about 150 amino acids to about 430 amino acids, between about 150 amino acids to about 420 amino acids, between about 150 amino acids to about 410 amino acids, between about 150 amino acids to about 400 amino acids, between about 150 amino acids to about 390 amino acids, between about 150 amino acids to about 380 amino acids, between about 150 amino acids to about 370 amino acids, between about 150 amino acids to about 360 amino acids, between about 150 amino acids to about 350 amino acids, between about 150 amino acids to about 340 amino acids, between about 150 amino acids to about 330 amino acids, between about 150 amino acids to about 320 amino acids, between about 150 amino acids to about 310 amino acids, between about 150 amino acids to about 300 amino acids, between about 150 amino acids to about 290 amino acids, between about 150 amino acids to about 280 amino acids, between about 150 amino acids to about 270 amino acids, between about 150 amino acids to about 260 amino acids, between about 150 amino acids to about 250 amino acids, between about 150 amino acids to about 240 amino acids, between about 150 amino acids to about 230 amino acids, between about 150 amino acids to about 220 amino acids, between about 150 amino acids to about 210 amino acids, between about 150 amino acids to about 200 amino acids, between about 150 amino acids to about 190 amino acids, between about 150 amino acids to about 180 amino acids, between about 150 amino acids to about 170 amino acids, between about 150 amino acids to about 160 amino acids, between about 180 amino acids to about 800 amino acids, between about 180 amino acids to about 790 amino acids, between about 180 amino acids to about 780 amino acids, between about 180 amino acids to about 770 amino acids, between about 180 amino acids to about 760 amino acids, between about 180 amino acids to about 750 amino acids, between about 180 amino acids to about 740 amino acids, between about 180 amino acids to about 730 amino acids, between about 180 amino acids to about 720 amino acids, between about 180 amino acids to about 710 amino acids, between about 180 amino acids to about 700 amino acids, between about 180 amino acids to about 690 amino acids, between about 180 amino acids to about 680 amino acids, between 30 amino acids to about 670 amino acids, between about 180 amino acids to about 660 amino acids, between about 180 amino acids to about 650 amino acids, between about 180 amino acids to about 640 amino acids, between about 30 amino acids to about 630 amino acids, between about 180 amino acids to about 620 amino acids, between about 180 amino acids to about 610 amino acids, between about 180 amino acids to about 600 amino acids, between about 180 amino acids to about 590 amino acids, between about 180 amino acids to about 580 amino acids, between about 180 amino acids to about 570 amino acids, between about 180 amino acids to about 560 amino acids, between about 180 amino acids to about 550 amino acids, between about 180 amino acids to about 540 amino acids, between about 180 amino acids to about 530 amino acids, between about 180 amino acids to about 520 amino acids, between about 180 amino acids to about 510 amino acids, between about 180 amino acids to about 500 amino acids, between about 180 amino acids to about 490 amino acids, between about 180 amino acids to about 480 amino acids, between about 180 amino acids to about 470 amino acids, between about 180 amino acids to about 460 amino acids, between about 180 amino acids to about 450 amino acids, between about 180 amino acids to about 440 amino acids, between about 180 amino acids to about 430 amino acids, between about 180 amino acids to about 420 amino acids, between about 180 amino acids to about 410 amino acids, between about 180 amino acids to about 400 amino acids, between about 180 amino acids to about 390 amino acids, between about 180 amino acids to about 380 amino acids, between about 180 amino acids to about 370 amino acids, between about 180 amino acids to about 360 amino acids, between about 180 amino acids to about 350 amino acids, between about 180 amino acids to about 340 amino acids, between about 180 amino acids to about 330 amino acids, between about 180 amino acids to about 320 amino acids, between about 180 amino acids to about 310 amino acids, between about 180 amino acids to about 300 amino acids, between about 180 amino acids to about 290 amino acids, between about 180 amino acids to about 280 amino acids, between about 180 amino acids to about 270 amino acids, between about 180 amino acids to about 260 amino acids, between about 180 amino acids to about 250 amino acids, between about 180 amino acids to about 240 amino acids, between about 180 amino acids to about 230 amino acids, between about 180 amino acids to about 220 amino acids, between about 180 amino acids to about 210 amino acids, between about 180 amino acids to about 200 amino acids, between about 180 amino acids to about 190 amino acids, between about 200 amino acids to about 800 amino acids, between about 200 amino acids to about 790 amino acids, between about 200 amino acids to about 780 amino acids, between about 200 amino acids to about 770 amino acids, between about 200 amino acids to about 760 amino acids, between about 200 amino acids to about 750 amino acids, between about 200 amino acids to about 740 amino acids, between about 200 amino acids to about 730 amino acids, between about 200 amino acids to about 720 amino acids, between about 200 amino acids to about 710 amino acids, between about 200 amino acids to about 700 amino acids, between about 200 amino acids to about 690 amino acids, between about 200 amino acids to about 680 amino acids, between 30 amino acids to about 670 amino acids, between about 200 amino acids to about 660 amino acids, between about 200 amino acids to about 650 amino acids, between about 200 amino acids to about 640 amino acids, between about 30 amino acids to about 630 amino acids, between about 200 amino acids to about 620 amino acids, between about 200 amino acids to about 610 amino acids, between about 200 amino acids to about 600 amino acids, between about 200 amino acids to about 590 amino acids, between about 200 amino acids to about 580 amino acids, between about 200 amino acids to about 570 amino acids, between about 200 amino acids to about 560 amino acids, between about 200 amino acids to about 550 amino acids, between about 200 amino acids to about 540 amino acids, between about 200 amino acids to about 530 amino acids, between about 200 amino acids to about 520 amino acids, between about 200 amino acids to about 510 amino acids, between about 200 amino acids to about 500 amino acids, between about 200 amino acids to about 490 amino acids, between about 200 amino acids to about 480 amino acids, between about 200 amino acids to about 470 amino acids, between about 200 amino acids to about 460 amino acids, between about 200 amino acids to about 450 amino acids, between about 200 amino acids to about 440 amino acids, between about 200 amino acids to about 430 amino acids, between about 200 amino acids to about 420 amino acids, between about 200 amino acids to about 410 amino acids, between about 200 amino acids to about 400 amino acids, between about 200 amino acids to about 390 amino acids, between about 200 amino acids to about 380 amino acids, between about 200 amino acids to about 370 amino acids, between about 200 amino acids to about 360 amino acids, between about 200 amino acids to about 350 amino acids, between about 200 amino acids to about 340 amino acids, between about 200 amino acids to about 330 amino acids, between about 200 amino acids to about 320 amino acids, between about 200 amino acids to about 310 amino acids, between about 200 amino acids to about 300 amino acids, between about 200 amino acids to about 290 amino acids, between about 200 amino acids to about 280 amino acids, between about 200 amino acids to about 270 amino acids, between about 200 amino acids to about 260 amino acids, between about 200 amino acids to about 250 amino acids, between about 200 amino acids to about 240 amino acids, between about 200 amino acids to about 230 amino acids, between about 200 amino acids to about 220 amino acids, between about 200 amino acids to about 210 amino acids, between about 250 amino acids to about 800 amino acids, between about 250 amino acids to about 790 amino acids, between about 250 amino acids to about 780 amino acids, between about 250 amino acids to about 770 amino acids, between about 250 amino acids to about 760 amino acids, between about 250 amino acids to about 750 amino acids, between about 250 amino acids to about 740 amino acids, between about 250 amino acids to about 730 amino acids, between about 250 amino acids to about 720 amino acids, between about 250 amino acids to about 710 amino acids, between about 250 amino acids to about 700 amino acids, between about 250 amino acids to about 690 amino acids, between about 250 amino acids to about 680 amino acids, between 30 amino acids to about 670 amino acids, between about 250 amino acids to about 660 amino acids, between about 250 amino acids to about 650 amino acids, between about 250 amino acids to about 640 amino acids, between about 30 amino acids to about 630 amino acids, between about 250 amino acids to about 620 amino acids, between about 250 amino acids to about 610 amino acids, between about 250 amino acids to about 600 amino acids, between about 250 amino acids to about 590 amino acids, between about 250 amino acids to about 580 amino acids, between about 250 amino acids to about 570 amino acids, between about 250 amino acids to about 560 amino acids, between about 250 amino acids to about 550 amino acids, between about 250 amino acids to about 540 amino acids, between about 250 amino acids to about 530 amino acids, between about 250 amino acids to about 520 amino acids, between about 250 amino acids to about 510 amino acids, between about 250 amino acids to about 500 amino acids, between about 250 amino acids to about 490 amino acids, between about 250 amino acids to about 480 amino acids, between about 250 amino acids to about 470 amino acids, between about 250 amino acids to about 460 amino acids, between about 250 amino acids to about 450 amino acids, between about 250 amino acids to about 440 amino acids, between about 250 amino acids to about 430 amino acids, between about 250 amino acids to about 420 amino acids, between about 250 amino acids to about 410 amino acids, between about 250 amino acids to about 400 amino acids, between about 250 amino acids to about 390 amino acids, between about 250 amino acids to about 380 amino acids, between about 250 amino acids to about 370 amino acids, between about 250 amino acids to about 360 amino acids, between about 250 amino acids to about 350 amino acids, between about 250 amino acids to about 340 amino acids, between about 250 amino acids to about 330 amino acids, between about 250 amino acids to about 320 amino acids, between about 250 amino acids to about 310 amino acids, between about 250 amino acids to about 300 amino acids, between about 250 amino acids to about 290 amino acids, between about 250 amino acids to about 280 amino acids, between about 250 amino acids to about 270 amino acids, between about 250 amino acids to about 260 amino acids, between about 280 amino acids to about 800 amino acids, between about 280 amino acids to about 790 amino acids, between about 280 amino acids to about 780 amino acids, between about 280 amino acids to about 770 amino acids, between about 280 amino acids to about 760 amino acids, between about 280 amino acids to about 750 amino acids, between about 280 amino acids to about 740 amino acids, between about 280 amino acids to about 730 amino acids, between about 280 amino acids to about 720 amino acids, between about 280 amino acids to about 710 amino acids, between about 280 amino acids to about 700 amino acids, between about 280 amino acids to about 690 amino acids, between about 280 amino acids to about 680 amino acids, between 30 amino acids to about 670 amino acids, between about 280 amino acids to about 660 amino acids, between about 280 amino acids to about 650 amino acids, between about 280 amino acids to about 640 amino acids, between about 30 amino acids to about 630 amino acids, between about 280 amino acids to about 620 amino acids, between about 280 amino acids to about 610 amino acids, between about 280 amino acids to about 600 amino acids, between about 280 amino acids to about 590 amino acids, between about 280 amino acids to about 580 amino acids, between about 280 amino acids to about 570 amino acids, between about 280 amino acids to about 560 amino acids, between about 280 amino acids to about 550 amino acids, between about 280 amino acids to about 540 amino acids, between about 280 amino acids to about 530 amino acids, between about 280 amino acids to about 520 amino acids, between about 280 amino acids to about 510 amino acids, between about 280 amino acids to about 500 amino acids, between about 280 amino acids to about 490 amino acids, between about 280 amino acids to about 480 amino acids, between about 280 amino acids to about 470 amino acids, between about 280 amino acids to about 460 amino acids, between about 280 amino acids to about 450 amino acids, between about 280 amino acids to about 440 amino acids, between about 280 amino acids to about 430 amino acids, between about 280 amino acids to about 420 amino acids, between about 280 amino acids to about 410 amino acids, between about 280 amino acids to about 400 amino acids, between about 280 amino acids to about 390 amino acids, between about 280 amino acids to about 380 amino acids, between about 280 amino acids to about 370 amino acids, between about 280 amino acids to about 360 amino acids, between about 280 amino acids to about 350 amino acids, between about 280 amino acids to about 340 amino acids, between about 280 amino acids to about 330 amino acids, between about 280 amino acids to about 320 amino acids, between about 280 amino acids to about 310 amino acids, between about 280 amino acids to about 300 amino acids, between about 300 amino acids to about 800 amino acids, between about 300 amino acids to about 790 amino acids, between about 300 amino acids to about 780 amino acids, between about 300 amino acids to about 770 amino acids, between about 300 amino acids to about 760 amino acids, between about 300 amino acids to about 750 amino acids, between about 300 amino acids to about 740 amino acids, between about 300 amino acids to about 730 amino acids, between about 300 amino acids to about 720 amino acids, between about 300 amino acids to about 710 amino acids, between about 300 amino acids to about 700 amino acids, between about 300 amino acids to about 690 amino acids, between about 300 amino acids to about 680 amino acids, between 30 amino acids to about 670 amino acids, between about 300 amino acids to about 660 amino acids, between about 300 amino acids to about 650 amino acids, between about 300 amino acids to about 640 amino acids, between about 30 amino acids to about 630 amino acids, between about 300 amino acids to about 620 amino acids, between about 300 amino acids to about 610 amino acids, between about 300 amino acids to about 600 amino acids, between about 300 amino acids to about 590 amino acids, between about 300 amino acids to about 580 amino acids, between about 300 amino acids to about 570 amino acids, between about 300 amino acids to about 560 amino acids, between about 300 amino acids to about 550 amino acids, between about 300 amino acids to about 540 amino acids, between about 300 amino acids to about 530 amino acids, between about 300 amino acids to about 520 amino acids, between about 300 amino acids to about 510 amino acids, between about 300 amino acids to about 500 amino acids, between about 300 amino acids to about 490 amino acids, between about 300 amino acids to about 480 amino acids, between about 300 amino acids to about 470 amino acids, between about 300 amino acids to about 460 amino acids, between about 300 amino acids to about 450 amino acids, between about 300 amino acids to about 440 amino acids, between about 300 amino acids to about 430 amino acids, between about 300 amino acids to about 420 amino acids, between about 300 amino acids to about 410 amino acids, between about 300 amino acids to about 400 amino acids, between about 300 amino acids to about 390 amino acids, between about 300 amino acids to about 380 amino acids, between about 300 amino acids to about 370 amino acids, between about 300 amino acids to about 360 amino acids, between about 300 amino acids to about 350 amino acids, between about 300 amino acids to about 340 amino acids, between about 300 amino acids to about 330 amino acids, between about 300 amino acids to about 320 amino acids, between about 300 amino acids to about 310 amino acids, between about 350 amino acids to about 800 amino acids, between about 350 amino acids to about 790 amino acids, between about 350 amino acids to about 780 amino acids, between about 350 amino acids to about 770 amino acids, between about 350 amino acids to about 760 amino acids, between about 350 amino acids to about 750 amino acids, between about 350 amino acids to about 740 amino acids, between about 350 amino acids to about 730 amino acids, between about 350 amino acids to about 720 amino acids, between about 350 amino acids to about 710 amino acids, between about 350 amino acids to about 700 amino acids, between about 350 amino acids to about 690 amino acids, between about 350 amino acids to about 680 amino acids, between 30 amino acids to about 670 amino acids, between about 350 amino acids to about 660 amino acids, between about 350 amino acids to about 650 amino acids, between about 350 amino acids to about 640 amino acids, between about 30 amino acids to about 630 amino acids, between about 350 amino acids to about 620 amino acids, between about 350 amino acids to about 610 amino acids, between about 350 amino acids to about 600 amino acids, between about 350 amino acids to about 590 amino acids, between about 350 amino acids to about 580 amino acids, between about 350 amino acids to about 570 amino acids, between about 350 amino acids to about 560 amino acids, between about 350 amino acids to about 550 amino acids, between about 350 amino acids to about 540 amino acids, between about 350 amino acids to about 530 amino acids, between about 350 amino acids to about 520 amino acids, between about 350 amino acids to about 510 amino acids, between about 350 amino acids to about 500 amino acids, between about 350 amino acids to about 490 amino acids, between about 350 amino acids to about 480 amino acids, between about 350 amino acids to about 470 amino acids, between about 350 amino acids to about 460 amino acids, between about 350 amino acids to about 450 amino acids, between about 350 amino acids to about 440 amino acids, between about 350 amino acids to about 430 amino acids, between about 350 amino acids to about 420 amino acids, between about 350 amino acids to about 410 amino acids, between about 350 amino acids to about 400 amino acids, between about 350 amino acids to about 390 amino acids, between about 350 amino acids to about 380 amino acids, between about 350 amino acids to about 370 amino acids, between about 350 amino acids to about 360 amino acids, between about 380 amino acids to about 800 amino acids, between about 380 amino acids to about 790 amino acids, between about 380 amino acids to about 780 amino acids, between about 380 amino acids to about 770 amino acids, between about 380 amino acids to about 760 amino acids, between about 380 amino acids to about 750 amino acids, between about 380 amino acids to about 740 amino acids, between about 380 amino acids to about 730 amino acids, between about 380 amino acids to about 720 amino acids, between about 380 amino acids to about 710 amino acids, between about 380 amino acids to about 700 amino acids, between about 380 amino acids to about 690 amino acids, between about 380 amino acids to about 680 amino acids, between 30 amino acids to about 670 amino acids, between about 380 amino acids to about 660 amino acids, between about 380 amino acids to about 650 amino acids, between about 380 amino acids to about 640 amino acids, between about 30 amino acids to about 630 amino acids, between about 380 amino acids to about 620 amino acids, between about 380 amino acids to about 610 amino acids, between about 380 amino acids to about 600 amino acids, between about 380 amino acids to about 590 amino acids, between about 380 amino acids to about 580 amino acids, between about 380 amino acids to about 570 amino acids, between about 380 amino acids to about 560 amino acids, between about 380 amino acids to about 550 amino acids, between about 380 amino acids to about 540 amino acids, between about 380 amino acids to about 530 amino acids, between about 380 amino acids to about 520 amino acids, between about 380 amino acids to about 510 amino acids, between about 380 amino acids to about 500 amino acids, between about 380 amino acids to about 490 amino acids, between about 380 amino acids to about 480 amino acids, between about 380 amino acids to about 470 amino acids, between about 380 amino acids to about 460 amino acids, between about 380 amino acids to about 450 amino acids, between about 380 amino acids to about 440 amino acids, between about 380 amino acids to about 430 amino acids, between about 380 amino acids to about 420 amino acids, between about 380 amino acids to about 410 amino acids, between about 380 amino acids to about 400 amino acids, between about 380 amino acids to about 390 amino acids, between about 400 amino acids to about 800 amino acids, between about 400 amino acids to about 790 amino acids, between about 400 amino acids to about 780 amino acids, between about 400 amino acids to about 770 amino acids, between about 400 amino acids to about 760 amino acids, between about 400 amino acids to about 750 amino acids, between about 400 amino acids to about 740 amino acids, between about 400 amino acids to about 730 amino acids, between about 400 amino acids to about 720 amino acids, between about 400 amino acids to about 710 amino acids, between about 400 amino acids to about 700 amino acids, between about 400 amino acids to about 690 amino acids, between about 400 amino acids to about 680 amino acids, between 30 amino acids to about 670 amino acids, between about 400 amino acids to about 660 amino acids, between about 400 amino acids to about 650 amino acids, between about 400 amino acids to about 640 amino acids, between about 30 amino acids to about 630 amino acids, between about 400 amino acids to about 620 amino acids, between about 400 amino acids to about 610 amino acids, between about 400 amino acids to about 600 amino acids, between about 400 amino acids to about 590 amino acids, between about 400 amino acids to about 580 amino acids, between about 400 amino acids to about 570 amino acids, between about 400 amino acids to about 560 amino acids, between about 400 amino acids to about 550 amino acids, between about 400 amino acids to about 540 amino acids, between about 400 amino acids to about 530 amino acids, between about 400 amino acids to about 520 amino acids, between about 400 amino acids to about 510 amino acids, between about 400 amino acids to about 500 amino acids, between about 400 amino acids to about 490 amino acids, between about 400 amino acids to about 480 amino acids, between about 400 amino acids to about 470 amino acids, between about 400 amino acids to about 460 amino acids, between about 400 amino acids to about 450 amino acids, between about 400 amino acids to about 440 amino acids, between about 400 amino acids to about 430 amino acids, between about 400 amino acids to about 420 amino acids, between about 400 amino acids to about 410 amino acids, between about 450 amino acids to about 800 amino acids, between about 450 amino acids to about 790 amino acids, between about 450 amino acids to about 780 amino acids, between about 450 amino acids to about 770 amino acids, between about 450 amino acids to about 760 amino acids, between about 450 amino acids to about 750 amino acids, between about 450 amino acids to about 740 amino acids, between about 450 amino acids to about 730 amino acids, between about 450 amino acids to about 720 amino acids, between about 450 amino acids to about 710 amino acids, between about 450 amino acids to about 700 amino acids, between about 450 amino acids to about 690 amino acids, between about 450 amino acids to about 680 amino acids, between 30 amino acids to about 670 amino acids, between about 450 amino acids to about 660 amino acids, between about 450 amino acids to about 650 amino acids, between about 450 amino acids to about 640 amino acids, between about 30 amino acids to about 630 amino acids, between about 450 amino acids to about 620 amino acids, between about 450 amino acids to about 610 amino acids, between about 450 amino acids to about 600 amino acids, between about 450 amino acids to about 590 amino acids, between about 450 amino acids to about 580 amino acids, between about 450 amino acids to about 570 amino acids, between about 450 amino acids to about 560 amino acids, between about 450 amino acids to about 550 amino acids, between about 450 amino acids to about 540 amino acids, between about 450 amino acids to about 530 amino acids, between about 450 amino acids to about 520 amino acids, between about 450 amino acids to about 510 amino acids, between about 450 amino acids to about 500 amino acids, between about 450 amino acids to about 490 amino acids, between about 450 amino acids to about 480 amino acids, between about 450 amino acids to about 470 amino acids, between about 450 amino acids to about 460 amino acids, between about 480 amino acids to about 800 amino acids, between about 480 amino acids to about 790 amino acids, between about 480 amino acids to about 780 amino acids, between about 480 amino acids to about 770 amino acids, between about 480 amino acids to about 760 amino acids, between about 480 amino acids to about 750 amino acids, between about 480 amino acids to about 740 amino acids, between about 480 amino acids to about 730 amino acids, between about 480 amino acids to about 720 amino acids, between about 480 amino acids to about 710 amino acids, between about 480 amino acids to about 700 amino acids, between about 480 amino acids to about 690 amino acids, between about 480 amino acids to about 680 amino acids, between 30 amino acids to about 670 amino acids, between about 480 amino acids to about 660 amino acids, between about 480 amino acids to about 650 amino acids, between about 480 amino acids to about 640 amino acids, between about 30 amino acids to about 630 amino acids, between about 480 amino acids to about 620 amino acids, between about 480 amino acids to about 610 amino acids, between about 480 amino acids to about 600 amino acids, between about 480 amino acids to about 590 amino acids, between about 480 amino acids to about 580 amino acids, between about 480 amino acids to about 570 amino acids, between about 480 amino acids to about 560 amino acids, between about 480 amino acids to about 550 amino acids, between about 480 amino acids to about 540 amino acids, between about 480 amino acids to about 530 amino acids, between about 480 amino acids to about 520 amino acids, between about 480 amino acids to about 510 amino acids, between about 480 amino acids to about 500 amino acids, between about 480 amino acids to about 490 amino acids, between about 50 amino acids to about 800 amino acids, between about 50 amino acids to about 790 amino acids, between about 50 amino acids to about 780 amino acids, between about 50 amino acids to about 770 amino acids, between about 50 amino acids to about 760 amino acids, between about 50 amino acids to about 750 amino acids, between about 50 amino acids to about 740 amino acids, between about 50 amino acids to about 730 amino acids, between about 50 amino acids to about 720 amino acids, between about 50 amino acids to about 710 amino acids, between about 50 amino acids to about 700 amino acids, between about 50 amino acids to about 690 amino acids, between about 50 amino acids to about 680 amino acids, between 30 amino acids to about 670 amino acids, between about 50 amino acids to about 660 amino acids, between about 50 amino acids to about 650 amino acids, between about 50 amino acids to about 640 amino acids, between about 30 amino acids to about 630 amino acids, between about 50 amino acids to about 620 amino acids, between about 50 amino acids to about 610 amino acids, between about 50 amino acids to about 600 amino acids, between about 50 amino acids to about 590 amino acids, between about 50 amino acids to about 580 amino acids, between about 50 amino acids to about 570 amino acids, between about 50 amino acids to about 560 amino acids, between about 50 amino acids to about 550 amino acids, between about 50 amino acids to about 540 amino acids, between about 50 amino acids to about 530 amino acids, between about 50 amino acids to about 520 amino acids, between about 50 amino acids to about 510 amino acids, between about 550 amino acids to about 800 amino acids, between about 550 amino acids to about 790 amino acids, between about 550 amino acids to about 780 amino acids, between about 550 amino acids to about 770 amino acids, between about 550 amino acids to about 760 amino acids, between about 550 amino acids to about 750 amino acids, between about 550 amino acids to about 740 amino acids, between about 550 amino acids to about 730 amino acids, between about 550 amino acids to about 720 amino acids, between about 550 amino acids to about 710 amino acids, between about 550 amino acids to about 700 amino acids, between about 550 amino acids to about 690 amino acids, between about 550 amino acids to about 680 amino acids, between 30 amino acids to about 670 amino acids, between about 550 amino acids to about 660 amino acids, between about 550 amino acids to about 650 amino acids, between about 550 amino acids to about 640 amino acids, between about 30 amino acids to about 630 amino acids, between about 550 amino acids to about 620 amino acids, between about 550 amino acids to about 610 amino acids, between about 550 amino acids to about 600 amino acids, between about 550 amino acids to about 590 amino acids, between about 550 amino acids to about 580 amino acids, between about 550 amino acids to about 570 amino acids, between about 550 amino acids to about 560 amino acids, between about 580 amino acids to about 800 amino acids, between about 580 amino acids to about 790 amino acids, between about 580 amino acids to about 780 amino acids, between about 580 amino acids to about 770 amino acids, between about 580 amino acids to about 760 amino acids, between about 580 amino acids to about 750 amino acids, between about 580 amino acids to about 740 amino acids, between about 580 amino acids to about 730 amino acids, between about 580 amino acids to about 720 amino acids, between about 580 amino acids to about 710 amino acids, between about 580 amino acids to about 700 amino acids, between about 580 amino acids to about 690 amino acids, between about 580 amino acids to about 680 amino acids, between 30 amino acids to about 670 amino acids, between about 580 amino acids to about 660 amino acids, between about 580 amino acids to about 650 amino acids, between about 580 amino acids to about 640 amino acids, between about 30 amino acids to about 630 amino acids, between about 580 amino acids to about 620 amino acids, between about 580 amino acids to about 610 amino acids, between about 580 amino acids to about 600 amino acids, between about 580 amino acids to about 590 amino acids, between about 600 amino acids to about 800 amino acids, between about 600 amino acids to about 790 amino acids, between about 600 amino acids to about 780 amino acids, between about 600 amino acids to about 770 amino acids, between about 600 amino acids to about 760 amino acids, between about 600 amino acids to about 750 amino acids, between about 600 amino acids to about 740 amino acids, between about 600 amino acids to about 730 amino acids, between about 600 amino acids to about 720 amino acids, between about 600 amino acids to about 710 amino acids, between about 600 amino acids to about 700 amino acids, between about 600 amino acids to about 690 amino acids, between about 600 amino acids to about 680 amino acids, between 30 amino acids to about 670 amino acids, between about 600 amino acids to about 660 amino acids, between about 600 amino acids to about 650 amino acids, between about 600 amino acids to about 640 amino acids, between about 30 amino acids to about 630 amino acids, between about 600 amino acids to about 620 amino acids, between about 600 amino acids to about 610 amino acids, between about 650 amino acids to about 800 amino acids, between about 650 amino acids to about 790 amino acids, between about 650 amino acids to about 780 amino acids, between about 650 amino acids to about 770 amino acids, between about 650 amino acids to about 760 amino acids, between about 650 amino acids to about 750 amino acids, between about 650 amino acids to about 740 amino acids, between about 650 amino acids to about 730 amino acids, between about 650 amino acids to about 720 amino acids, between about 650 amino acids to about 710 amino acids, between about 650 amino acids to about 700 amino acids, between about 650 amino acids to about 690 amino acids, between about 650 amino acids to about 680 amino acids, between 30 amino acids to about 670 amino acids, between about 650 amino acids to about 660 amino acids, between about 680 amino acids to about 800 amino acids, between about 680 amino acids to about 790 amino acids, between about 680 amino acids to about 780 amino acids, between about 680 amino acids to about 770 amino acids, between about 680 amino acids to about 760 amino acids, between about 680 amino acids to about 750 amino acids, between about 680 amino acids to about 740 amino acids, between about 680 amino acids to about 730 amino acids, between about 680 amino acids to about 720 amino acids, between about 680 amino acids to about 710 amino acids, between about 680 amino acids to about 700 amino acids, between about 680 amino acids to about 690 amino acids, between about 700 amino acids to about 800 amino acids, between about 700 amino acids to about 790 amino acids, between about 700 amino acids to about 780 amino acids, between about 700 amino acids to about 770 amino acids, between about 700 amino acids to about 760 amino acids, between about 700 amino acids to about 750 amino acids, between about 700 amino acids to about 740 amino acids, between about 700 amino acids to about 730 amino acids, between about 700 amino acids to about 720 amino acids, between about 700 amino acids to about 710 amino acids, between about 750 amino acids to about 800 amino acids, between about 750 amino acids to about 790 amino acids, between about 750 amino acids to about 780 amino acids, between about 750 amino acids to about 770 amino acids, between about 750 amino acids to about 760 amino acids, or between about 780 amino acids to about 800 amino acids) in length. In some examples, the first vector further includes one or both of a promoter (e.g., any of the promoters described herein or known in the art) and a Kozak sequence (e.g., any of the exemplary Kozak sequences described herein or known in the art). In some examples, the first vector includes a promoter that is an inducible promoter, a constitutive promoter, or a tissue-specific promoter. In some examples, the second of the two different vectors includes a coding sequence that encodes a C-terminal portion of the target protein (e.g., a C-terminal potion of the supporting cell target protein or a C-terminal portion of the hair cell target protein). In some examples, the C-terminal portion of the target protein (e.g., the C-terminal portion of the supporting cell target protein or the C-terminal portion of the hair cell target protein) is between about 30 amino acids to about 800 amino acids (e.g., between about 30 amino acids to about 790 amino acids, between about 30 amino acids to about 780 amino acids, between about 30 amino acids to about 770 amino acids, between about 30 amino acids to about 760 amino acids, between about 30 amino acids to about 750 amino acids, between about 30 amino acids to about 740 amino acids, between about 30 amino acids to about 730 amino acids, between about 30 amino acids to about 720 amino acids, between about 30 amino acids to about 710 amino acids, between about 30 amino acids to about 700 amino acids, between about 30 amino acids to about 690 amino acids, between about 30 amino acids to about 680 amino acids, between 30 amino acids to about 670 amino acids, between about 30 amino acids to about 660 amino acids, between about 30 amino acids to about 650 amino acids, between about 30 amino acids to about 640 amino acids, between about 30 amino acids to about 630 amino acids, between about 30 amino acids to about 620 amino acids, between about 30 amino acids to about 610 amino acids, between about 30 amino acids to about 600 amino acids, between about 30 amino acids to about 590 amino acids, between about 30 amino acids to about 580 amino acids, between about 30 amino acids to about 570 amino acids, between about 30 amino acids to about 560 amino acids, between about 30 amino acids to about 550 amino acids, between about 30 amino acids to about 540 amino acids, between about 30 amino acids to about 530 amino acids, between about 30 amino acids to about 520 amino acids, between about 30 amino acids to about 510 amino acids, between about 30 amino acids to about 500 amino acids, between about 30 amino acids to about 490 amino acids, between about 30 amino acids to about 480 amino acids, between about 30 amino acids to about 470 amino acids, between about 30 amino acids to about 460 amino acids, between about 30 amino acids to about 450 amino acids, between about 30 amino acids to about 440 amino acids, between about 30 amino acids to about 430 amino acids, between about 30 amino acids to about 420 amino acids, between about 30 amino acids to about 410 amino acids, between about 30 amino acids to about 400 amino acids, between about 30 amino acids to about 390 amino acids, between about 30 amino acids to about 380 amino acids, between about 30 amino acids to about 370 amino acids, between about 30 amino acids to about 360 amino acids, between about 30 amino acids to about 350 amino acids, between about 30 amino acids to about 340 amino acids, between about 30 amino acids to about 330 amino acids, between about 30 amino acids to about 320 amino acids, between about 30 amino acids to about 310 amino acids, between about 30 amino acids to about 300 amino acids, between about 30 amino acids to about 290 amino acids, between about 30 amino acids to about 280 amino acids, between about 30 amino acids to about 270 amino acids, between about 30 amino acids to about 260 amino acids, between about 30 amino acids to about 250 amino acids, between about 30 amino acids to about 240 amino acids, between about 30 amino acids to about 230 amino acids, between about 30 amino acids to about 220 amino acids, between about 30 amino acids to about 210 amino acids, between about 30 amino acids to about 200 amino acids, between about 30 amino acids to about 190 amino acids, between about 30 amino acids to about 180 amino acids, between about 30 amino acids to about 170 amino acids, between about 30 amino acids to about 160 amino acids, between about 30 amino acids to about 150 amino acids, between about 30 amino acids to about 140 amino acids, between about 30 amino acids to about 130 amino acids, between about 30 amino acids to about 120 amino acids, between about 30 amino acids to about 110 amino acids, between about 30 amino acids to about 100 amino acids, between about 30 amino acids to about 90 amino acids, between about 30 amino acids to about 80 amino acids, between about 30 amino acids to about 70 amino acids, between about 30 amino acids to about 60 amino acids, between about 30 amino acids to about 50 amino acids, between about 30 amino acids to about 40 amino acids, between about 50 amino acids to about 800 amino acids, between about 50 amino acids to about 790 amino acids, between about 50 amino acids to about 780 amino acids, between about 50 amino acids to about 770 amino acids, between about 50 amino acids to about 760 amino acids, between about 50 amino acids to about 750 amino acids, between about 50 amino acids to about 740 amino acids, between about 50 amino acids to about 730 amino acids, between about 50 amino acids to about 720 amino acids, between about 50 amino acids to about 710 amino acids, between about 50 amino acids to about 700 amino acids, between about 50 amino acids to about 690 amino acids, between about 50 amino acids to about 680 amino acids, between 30 amino acids to about 670 amino acids, between about 50 amino acids to about 660 amino acids, between about 50 amino acids to about 650 amino acids, between about 50 amino acids to about 640 amino acids, between about 30 amino acids to about 630 amino acids, between about 50 amino acids to about 620 amino acids, between about 50 amino acids to about 610 amino acids, between about 50 amino acids to about 600 amino acids, between about 50 amino acids to about 590 amino acids, between about 50 amino acids to about 580 amino acids, between about 50 amino acids to about 570 amino acids, between about 50 amino acids to about 560 amino acids, between about 50 amino acids to about 550 amino acids, between about 50 amino acids to about 540 amino acids, between about 50 amino acids to about 530 amino acids, between about 50 amino acids to about 520 amino acids, between about 50 amino acids to about 510 amino acids, between about 50 amino acids to about 500 amino acids, between about 50 amino acids to about 490 amino acids, between about 50 amino acids to about 480 amino acids, between about 50 amino acids to about 470 amino acids, between about 50 amino acids to about 460 amino acids, between about 50 amino acids to about 450 amino acids, between about 50 amino acids to about 440 amino acids, between about 50 amino acids to about 430 amino acids, between about 50 amino acids to about 420 amino acids, between about 50 amino acids to about 410 amino acids, between about 50 amino acids to about 400 amino acids, between about 50 amino acids to about 390 amino acids, between about 50 amino acids to about 380 amino acids, between about 50 amino acids to about 370 amino acids, between about 50 amino acids to about 360 amino acids, between about 50 amino acids to about 350 amino acids, between about 50 amino acids to about 340 amino acids, between about 50 amino acids to about 330 amino acids, between about 50 amino acids to about 320 amino acids, between about 50 amino acids to about 310 amino acids, between about 50 amino acids to about 300 amino acids, between about 50 amino acids to about 290 amino acids, between about 50 amino acids to about 280 amino acids, between about 50 amino acids to about 270 amino acids, between about 50 amino acids to about 260 amino acids, between about 50 amino acids to about 250 amino acids, between about 50 amino acids to about 240 amino acids, between about 50 amino acids to about 230 amino acids, between about 50 amino acids to about 220 amino acids, between about 50 amino acids to about 210 amino acids, between about 50 amino acids to about 200 amino acids, between about 50 amino acids to about 190 amino acids, between about 50 amino acids to about 180 amino acids, between about 50 amino acids to about 170 amino acids, between about 50 amino acids to about 160 amino acids, between about 50 amino acids to about 150 amino acids, between about 50 amino acids to about 140 amino acids, between about 50 amino acids to about 130 amino acids, between about 50 amino acids to about 120 amino acids, between about 50 amino acids to about 110 amino acids, between about 50 amino acids to about 100 amino acids, between about 50 amino acids to about 90 amino acids, between about 50 amino acids to about 80 amino acids, between about 50 amino acids to about 70 amino acids, between about 50 amino acids to about 60 amino acids, between about 80 amino acids to about 800 amino acids, between about 80 amino acids to about 790 amino acids, between about 80 amino acids to about 780 amino acids, between about 80 amino acids to about 770 amino acids, between about 80 amino acids to about 760 amino acids, between about 80 amino acids to about 750 amino acids, between about 80 amino acids to about 740 amino acids, between about 80 amino acids to about 730 amino acids, between about 80 amino acids to about 720 amino acids, between about 80 amino acids to about 710 amino acids, between about 80 amino acids to about 700 amino acids, between about 80 amino acids to about 690 amino acids, between about 80 amino acids to about 680 amino acids, between 30 amino acids to about 670 amino acids, between about 80 amino acids to about 660 amino acids, between about 80 amino acids to about 650 amino acids, between about 80 amino acids to about 640 amino acids, between about 30 amino acids to about 630 amino acids, between about 80 amino acids to about 620 amino acids, between about 80 amino acids to about 610 amino acids, between about 80 amino acids to about 600 amino acids, between about 80 amino acids to about 590 amino acids, between about 80 amino acids to about 580 amino acids, between about 80 amino acids to about 570 amino acids, between about 80 amino acids to about 560 amino acids, between about 80 amino acids to about 550 amino acids, between about 80 amino acids to about 540 amino acids, between about 80 amino acids to about 530 amino acids, between about 80 amino acids to about 520 amino acids, between about 80 amino acids to about 510 amino acids, between about 80 amino acids to about 500 amino acids, between about 80 amino acids to about 490 amino acids, between about 80 amino acids to about 480 amino acids, between about 80 amino acids to about 470 amino acids, between about 80 amino acids to about 460 amino acids, between about 80 amino acids to about 450 amino acids, between about 80 amino acids to about 440 amino acids, between about 80 amino acids to about 430 amino acids, between about 80 amino acids to about 420 amino acids, between about 80 amino acids to about 410 amino acids, between about 80 amino acids to about 400 amino acids, between about 80 amino acids to about 390 amino acids, between about 80 amino acids to about 380 amino acids, between about 80 amino acids to about 370 amino acids, between about 80 amino acids to about 360 amino acids, between about 80 amino acids to about 350 amino acids, between about 80 amino acids to about 340 amino acids, between about 80 amino acids to about 330 amino acids, between about 80 amino acids to about 320 amino acids, between about 80 amino acids to about 310 amino acids, between about 80 amino acids to about 300 amino acids, between about 80 amino acids to about 290 amino acids, between about 80 amino acids to about 280 amino acids, between about 80 amino acids to about 270 amino acids, between about 80 amino acids to about 260 amino acids, between about 80 amino acids to about 250 amino acids, between about 80 amino acids to about 240 amino acids, between about 80 amino acids to about 230 amino acids, between about 80 amino acids to about 220 amino acids, between about 80 amino acids to about 210 amino acids, between about 80 amino acids to about 200 amino acids, between about 80 amino acids to about 190 amino acids, between about 80 amino acids to about 180 amino acids, between about 80 amino acids to about 170 amino acids, between about 80 amino acids to about 160 amino acids, between about 80 amino acids to about 150 amino acids, between about 80 amino acids to about 140 amino acids, between about 80 amino acids to about 130 amino acids, between about 80 amino acids to about 120 amino acids, between about 80 amino acids to about 110 amino acids, between about 80 amino acids to about 100 amino acids, between about 100 amino acids to about 800 amino acids, between about 100 amino acids to about 790 amino acids, between about 100 amino acids to about 780 amino acids, between about 100 amino acids to about 770 amino acids, between about 100 amino acids to about 760 amino acids, between about 100 amino acids to about 750 amino acids, between about 100 amino acids to about 740 amino acids, between about 100 amino acids to about 730 amino acids, between about 100 amino acids to about 720 amino acids, between about 100 amino acids to about 710 amino acids, between about 100 amino acids to about 700 amino acids, between about 100 amino acids to about 690 amino acids, between about 100 amino acids to about 680 amino acids, between 30 amino acids to about 670 amino acids, between about 100 amino acids to about 660 amino acids, between about 100 amino acids to about 650 amino acids, between about 100 amino acids to about 640 amino acids, between about 30 amino acids to about 630 amino acids, between about 100 amino acids to about 620 amino acids, between about 100 amino acids to about 610 amino acids, between about 100 amino acids to about 600 amino acids, between about 100 amino acids to about 590 amino acids, between about 100 amino acids to about 580 amino acids, between about 100 amino acids to about 570 amino acids, between about 100 amino acids to about 560 amino acids, between about 100 amino acids to about 550 amino acids, between about 100 amino acids to about 540 amino acids, between about 100 amino acids to about 530 amino acids, between about 100 amino acids to about 520 amino acids, between about 100 amino acids to about 510 amino acids, between about 100 amino acids to about 500 amino acids, between about 100 amino acids to about 490 amino acids, between about 100 amino acids to about 480 amino acids, between about 100 amino acids to about 470 amino acids, between about 100 amino acids to about 460 amino acids, between about 100 amino acids to about 450 amino acids, between about 100 amino acids to about 440 amino acids, between about 100 amino acids to about 430 amino acids, between about 100 amino acids to about 420 amino acids, between about 100 amino acids to about 410 amino acids, between about 100 amino acids to about 400 amino acids, between about 100 amino acids to about 390 amino acids, between about 100 amino acids to about 380 amino acids, between about 100 amino acids to about 370 amino acids, between about 100 amino acids to about 360 amino acids, between about 100 amino acids to about 350 amino acids, between about 100 amino acids to about 340 amino acids, between about 100 amino acids to about 330 amino acids, between about 100 amino acids to about 320 amino acids, between about 100 amino acids to about 310 amino acids, between about 100 amino acids to about 300 amino acids, between about 100 amino acids to about 290 amino acids, between about 100 amino acids to about 280 amino acids, between about 100 amino acids to about 270 amino acids, between about 100 amino acids to about 260 amino acids, between about 100 amino acids to about 250 amino acids, between about 100 amino acids to about 240 amino acids, between about 100 amino acids to about 230 amino acids, between about 100 amino acids to about 220 amino acids, between about 100 amino acids to about 210 amino acids, between about 100 amino acids to about 200 amino acids, between about 100 amino acids to about 190 amino acids, between about 100 amino acids to about 180 amino acids, between about 100 amino acids to about 170 amino acids, between about 100 amino acids to about 160 amino acids, between about 100 amino acids to about 150 amino acids, between about 100 amino acids to about 140 amino acids, between about 100 amino acids to about 130 amino acids, between about 100 amino acids to about 120 amino acids, between about 100 amino acids to about 110 amino acids, between about 120 amino acids to about 800 amino acids, between about 120 amino acids to about 790 amino acids, between about 120 amino acids to about 780 amino acids, between about 120 amino acids to about 770 amino acids, between about 120 amino acids to about 760 amino acids, between about 120 amino acids to about 750 amino acids, between about 120 amino acids to about 740 amino acids, between about 120 amino acids to about 730 amino acids, between about 120 amino acids to about 720 amino acids, between about 120 amino acids to about 710 amino acids, between about 120 amino acids to about 700 amino acids, between about 120 amino acids to about 690 amino acids, between about 120 amino acids to about 680 amino acids, between 30 amino acids to about 670 amino acids, between about 120 amino acids to about 660 amino acids, between about 120 amino acids to about 650 amino acids, between about 120 amino acids to about 640 amino acids, between about 30 amino acids to about 630 amino acids, between about 120 amino acids to about 620 amino acids, between about 120 amino acids to about 610 amino acids, between about 120 amino acids to about 600 amino acids, between about 120 amino acids to about 590 amino acids, between about 120 amino acids to about 580 amino acids, between about 120 amino acids to about 570 amino acids, between about 120 amino acids to about 560 amino acids, between about 120 amino acids to about 550 amino acids, between about 120 amino acids to about 540 amino acids, between about 120 amino acids to about 530 amino acids, between about 120 amino acids to about 520 amino acids, between about 120 amino acids to about 510 amino acids, between about 120 amino acids to about 500 amino acids, between about 120 amino acids to about 490 amino acids, between about 120 amino acids to about 480 amino acids, between about 120 amino acids to about 470 amino acids, between about 120 amino acids to about 460 amino acids, between about 120 amino acids to about 450 amino acids, between about 120 amino acids to about 440 amino acids, between about 120 amino acids to about 430 amino acids, between about 120 amino acids to about 420 amino acids, between about 120 amino acids to about 410 amino acids, between about 120 amino acids to about 400 amino acids, between about 120 amino acids to about 390 amino acids, between about 120 amino acids to about 380 amino acids, between about 120 amino acids to about 370 amino acids, between about 120 amino acids to about 360 amino acids, between about 120 amino acids to about 350 amino acids, between about 120 amino acids to about 340 amino acids, between about 120 amino acids to about 330 amino acids, between about 120 amino acids to about 320 amino acids, between about 120 amino acids to about 310 amino acids, between about 120 amino acids to about 300 amino acids, between about 120 amino acids to about 290 amino acids, between about 120 amino acids to about 280 amino acids, between about 120 amino acids to about 270 amino acids, between about 120 amino acids to about 260 amino acids, between about 120 amino acids to about 250 amino acids, between about 120 amino acids to about 240 amino acids, between about 120 amino acids to about 230 amino acids, between about 120 amino acids to about 220 amino acids, between about 120 amino acids to about 210 amino acids, between about 120 amino acids to about 200 amino acids, between about 120 amino acids to about 190 amino acids, between about 120 amino acids to about 180 amino acids, between about 120 amino acids to about 170 amino acids, between about 120 amino acids to about 160 amino acids, between about 120 amino acids to about 150 amino acids, between about 120 amino acids to about 140 amino acids, between about 120 amino acids to about 130 amino acids, between about 150 amino acids to about 800 amino acids, between about 150 amino acids to about 790 amino acids, between about 150 amino acids to about 780 amino acids, between about 150 amino acids to about 770 amino acids, between about 150 amino acids to about 760 amino acids, between about 150 amino acids to about 750 amino acids, between about 150 amino acids to about 740 amino acids, between about 150 amino acids to about 730 amino acids, between about 150 amino acids to about 720 amino acids, between about 150 amino acids to about 710 amino acids, between about 150 amino acids to about 700 amino acids, between about 150 amino acids to about 690 amino acids, between about 150 amino acids to about 680 amino acids, between 30 amino acids to about 670 amino acids, between about 150 amino acids to about 660 amino acids, between about 150 amino acids to about 650 amino acids, between about 150 amino acids to about 640 amino acids, between about 30 amino acids to about 630 amino acids, between about 150 amino acids to about 620 amino acids, between about 150 amino acids to about 610 amino acids, between about 150 amino acids to about 600 amino acids, between about 150 amino acids to about 590 amino acids, between about 150 amino acids to about 580 amino acids, between about 150 amino acids to about 570 amino acids, between about 150 amino acids to about 560 amino acids, between about 150 amino acids to about 550 amino acids, between about 150 amino acids to about 540 amino acids, between about 150 amino acids to about 530 amino acids, between about 150 amino acids to about 520 amino acids, between about 150 amino acids to about 510 amino acids, between about 150 amino acids to about 500 amino acids, between about 150 amino acids to about 490 amino acids, between about 150 amino acids to about 480 amino acids, between about 150 amino acids to about 470 amino acids, between about 150 amino acids to about 460 amino acids, between about 150 amino acids to about 450 amino acids, between about 150 amino acids to about 440 amino acids, between about 150 amino acids to about 430 amino acids, between about 150 amino acids to about 420 amino acids, between about 150 amino acids to about 410 amino acids, between about 150 amino acids to about 400 amino acids, between about 150 amino acids to about 390 amino acids, between about 150 amino acids to about 380 amino acids, between about 150 amino acids to about 370 amino acids, between about 150 amino acids to about 360 amino acids, between about 150 amino acids to about 350 amino acids, between about 150 amino acids to about 340 amino acids, between about 150 amino acids to about 330 amino acids, between about 150 amino acids to about 320 amino acids, between about 150 amino acids to about 310 amino acids, between about 150 amino acids to about 300 amino acids, between about 150 amino acids to about 290 amino acids, between about 150 amino acids to about 280 amino acids, between about 150 amino acids to about 270 amino acids, between about 150 amino acids to about 260 amino acids, between about 150 amino acids to about 250 amino acids, between about 150 amino acids to about 240 amino acids, between about 150 amino acids to about 230 amino acids, between about 150 amino acids to about 220 amino acids, between about 150 amino acids to about 210 amino acids, between about 150 amino acids to about 200 amino acids, between about 150 amino acids to about 190 amino acids, between about 150 amino acids to about 180 amino acids, between about 150 amino acids to about 170 amino acids, between about 150 amino acids to about 160 amino acids, between about 180 amino acids to about 800 amino acids, between about 180 amino acids to about 790 amino acids, between about 180 amino acids to about 780 amino acids, between about 180 amino acids to about 770 amino acids, between about 180 amino acids to about 760 amino acids, between about 180 amino acids to about 750 amino acids, between about 180 amino acids to about 740 amino acids, between about 180 amino acids to about 730 amino acids, between about 180 amino acids to about 720 amino acids, between about 180 amino acids to about 710 amino acids, between about 180 amino acids to about 700 amino acids, between about 180 amino acids to about 690 amino acids, between about 180 amino acids to about 680 amino acids, between 30 amino acids to about 670 amino acids, between about 180 amino acids to about 660 amino acids, between about 180 amino acids to about 650 amino acids, between about 180 amino acids to about 640 amino acids, between about 30 amino acids to about 630 amino acids, between about 180 amino acids to about 620 amino acids, between about 180 amino acids to about 610 amino acids, between about 180 amino acids to about 600 amino acids, between about 180 amino acids to about 590 amino acids, between about 180 amino acids to about 580 amino acids, between about 180 amino acids to about 570 amino acids, between about 180 amino acids to about 560 amino acids, between about 180 amino acids to about 550 amino acids, between about 180 amino acids to about 540 amino acids, between about 180 amino acids to about 530 amino acids, between about 180 amino acids to about 520 amino acids, between about 180 amino acids to about 510 amino acids, between about 180 amino acids to about 500 amino acids, between about 180 amino acids to about 490 amino acids, between about 180 amino acids to about 480 amino acids, between about 180 amino acids to about 470 amino acids, between about 180 amino acids to about 460 amino acids, between about 180 amino acids to about 450 amino acids, between about 180 amino acids to about 440 amino acids, between about 180 amino acids to about 430 amino acids, between about 180 amino acids to about 420 amino acids, between about 180 amino acids to about 410 amino acids, between about 180 amino acids to about 400 amino acids, between about 180 amino acids to about 390 amino acids, between about 180 amino acids to about 380 amino acids, between about 180 amino acids to about 370 amino acids, between about 180 amino acids to about 360 amino acids, between about 180 amino acids to about 350 amino acids, between about 180 amino acids to about 340 amino acids, between about 180 amino acids to about 330 amino acids, between about 180 amino acids to about 320 amino acids, between about 180 amino acids to about 310 amino acids, between about 180 amino acids to about 300 amino acids, between about 180 amino acids to about 290 amino acids, between about 180 amino acids to about 280 amino acids, between about 180 amino acids to about 270 amino acids, between about 180 amino acids to about 260 amino acids, between about 180 amino acids to about 250 amino acids, between about 180 amino acids to about 240 amino acids, between about 180 amino acids to about 230 amino acids, between about 180 amino acids to about 220 amino acids, between about 180 amino acids to about 210 amino acids, between about 180 amino acids to about 200 amino acids, between about 180 amino acids to about 190 amino acids, between about 200 amino acids to about 800 amino acids, between about 200 amino acids to about 790 amino acids, between about 200 amino acids to about 780 amino acids, between about 200 amino acids to about 770 amino acids, between about 200 amino acids to about 760 amino acids, between about 200 amino acids to about 750 amino acids, between about 200 amino acids to about 740 amino acids, between about 200 amino acids to about 730 amino acids, between about 200 amino acids to about 720 amino acids, between about 200 amino acids to about 710 amino acids, between about 200 amino acids to about 700 amino acids, between about 200 amino acids to about 690 amino acids, between about 200 amino acids to about 680 amino acids, between 30 amino acids to about 670 amino acids, between about 200 amino acids to about 660 amino acids, between about 200 amino acids to about 650 amino acids, between about 200 amino acids to about 640 amino acids, between about 30 amino acids to about 630 amino acids, between about 200 amino acids to about 620 amino acids, between about 200 amino acids to about 610 amino acids, between about 200 amino acids to about 600 amino acids, between about 200 amino acids to about 590 amino acids, between about 200 amino acids to about 580 amino acids, between about 200 amino acids to about 570 amino acids, between about 200 amino acids to about 560 amino acids, between about 200 amino acids to about 550 amino acids, between about 200 amino acids to about 540 amino acids, between about 200 amino acids to about 530 amino acids, between about 200 amino acids to about 520 amino acids, between about 200 amino acids to about 510 amino acids, between about 200 amino acids to about 500 amino acids, between about 200 amino acids to about 490 amino acids, between about 200 amino acids to about 480 amino acids, between about 200 amino acids to about 470 amino acids, between about 200 amino acids to about 460 amino acids, between about 200 amino acids to about 450 amino acids, between about 200 amino acids to about 440 amino acids, between about 200 amino acids to about 430 amino acids, between about 200 amino acids to about 420 amino acids, between about 200 amino acids to about 410 amino acids, between about 200 amino acids to about 400 amino acids, between about 200 amino acids to about 390 amino acids, between about 200 amino acids to about 380 amino acids, between about 200 amino acids to about 370 amino acids, between about 200 amino acids to about 360 amino acids, between about 200 amino acids to about 350 amino acids, between about 200 amino acids to about 340 amino acids, between about 200 amino acids to about 330 amino acids, between about 200 amino acids to about 320 amino acids, between about 200 amino acids to about 310 amino acids, between about 200 amino acids to about 300 amino acids, between about 200 amino acids to about 290 amino acids, between about 200 amino acids to about 280 amino acids, between about 200 amino acids to about 270 amino acids, between about 200 amino acids to about 260 amino acids, between about 200 amino acids to about 250 amino acids, between about 200 amino acids to about 240 amino acids, between about 200 amino acids to about 230 amino acids, between about 200 amino acids to about 220 amino acids, between about 200 amino acids to about 210 amino acids, between about 250 amino acids to about 800 amino acids, between about 250 amino acids to about 790 amino acids, between about 250 amino acids to about 780 amino acids, between about 250 amino acids to about 770 amino acids, between about 250 amino acids to about 760 amino acids, between about 250 amino acids to about 750 amino acids, between about 250 amino acids to about 740 amino acids, between about 250 amino acids to about 730 amino acids, between about 250 amino acids to about 720 amino acids, between about 250 amino acids to about 710 amino acids, between about 250 amino acids to about 700 amino acids, between about 250 amino acids to about 690 amino acids, between about 250 amino acids to about 680 amino acids, between 30 amino acids to about 670 amino acids, between about 250 amino acids to about 660 amino acids, between about 250 amino acids to about 650 amino acids, between about 250 amino acids to about 640 amino acids, between about 30 amino acids to about 630 amino acids, between about 250 amino acids to about 620 amino acids, between about 250 amino acids to about 610 amino acids, between about 250 amino acids to about 600 amino acids, between about 250 amino acids to about 590 amino acids, between about 250 amino acids to about 580 amino acids, between about 250 amino acids to about 570 amino acids, between about 250 amino acids to about 560 amino acids, between about 250 amino acids to about 550 amino acids, between about 250 amino acids to about 540 amino acids, between about 250 amino acids to about 530 amino acids, between about 250 amino acids to about 520 amino acids, between about 250 amino acids to about 510 amino acids, between about 250 amino acids to about 500 amino acids, between about 250 amino acids to about 490 amino acids, between about 250 amino acids to about 480 amino acids, between about 250 amino acids to about 470 amino acids, between about 250 amino acids to about 460 amino acids, between about 250 amino acids to about 450 amino acids, between about 250 amino acids to about 440 amino acids, between about 250 amino acids to about 430 amino acids, between about 250 amino acids to about 420 amino acids, between about 250 amino acids to about 410 amino acids, between about 250 amino acids to about 400 amino acids, between about 250 amino acids to about 390 amino acids, between about 250 amino acids to about 380 amino acids, between about 250 amino acids to about 370 amino acids, between about 250 amino acids to about 360 amino acids, between about 250 amino acids to about 350 amino acids, between about 250 amino acids to about 340 amino acids, between about 250 amino acids to about 330 amino acids, between about 250 amino acids to about 320 amino acids, between about 250 amino acids to about 310 amino acids, between about 250 amino acids to about 300 amino acids, between about 250 amino acids to about 290 amino acids, between about 250 amino acids to about 280 amino acids, between about 250 amino acids to about 270 amino acids, between about 250 amino acids to about 260 amino acids, between about 280 amino acids to about 800 amino acids, between about 280 amino acids to about 790 amino acids, between about 280 amino acids to about 780 amino acids, between about 280 amino acids to about 770 amino acids, between about 280 amino acids to about 760 amino acids, between about 280 amino acids to about 750 amino acids, between about 280 amino acids to about 740 amino acids, between about 280 amino acids to about 730 amino acids, between about 280 amino acids to about 720 amino acids, between about 280 amino acids to about 710 amino acids, between about 280 amino acids to about 700 amino acids, between about 280 amino acids to about 690 amino acids, between about 280 amino acids to about 680 amino acids, between 30 amino acids to about 670 amino acids, between about 280 amino acids to about 660 amino acids, between about 280 amino acids to about 650 amino acids, between about 280 amino acids to about 640 amino acids, between about 30 amino acids to about 630 amino acids, between about 280 amino acids to about 620 amino acids, between about 280 amino acids to about 610 amino acids, between about 280 amino acids to about 600 amino acids, between about 280 amino acids to about 590 amino acids, between about 280 amino acids to about 580 amino acids, between about 280 amino acids to about 570 amino acids, between about 280 amino acids to about 560 amino acids, between about 280 amino acids to about 550 amino acids, between about 280 amino acids to about 540 amino acids, between about 280 amino acids to about 530 amino acids, between about 280 amino acids to about 520 amino acids, between about 280 amino acids to about 510 amino acids, between about 280 amino acids to about 500 amino acids, between about 280 amino acids to about 490 amino acids, between about 280 amino acids to about 480 amino acids, between about 280 amino acids to about 470 amino acids, between about 280 amino acids to about 460 amino acids, between about 280 amino acids to about 450 amino acids, between about 280 amino acids to about 440 amino acids, between about 280 amino acids to about 430 amino acids, between about 280 amino acids to about 420 amino acids, between about 280 amino acids to about 410 amino acids, between about 280 amino acids to about 400 amino acids, between about 280 amino acids to about 390 amino acids, between about 280 amino acids to about 380 amino acids, between about 280 amino acids to about 370 amino acids, between about 280 amino acids to about 360 amino acids, between about 280 amino acids to about 350 amino acids, between about 280 amino acids to about 340 amino acids, between about 280 amino acids to about 330 amino acids, between about 280 amino acids to about 320 amino acids, between about 280 amino acids to about 310 amino acids, between about 280 amino acids to about 300 amino acids, between about 300 amino acids to about 800 amino acids, between about 300 amino acids to about 790 amino acids, between about 300 amino acids to about 780 amino acids, between about 300 amino acids to about 770 amino acids, between about 300 amino acids to about 760 amino acids, between about 300 amino acids to about 750 amino acids, between about 300 amino acids to about 740 amino acids, between about 300 amino acids to about 730 amino acids, between about 300 amino acids to about 720 amino acids, between about 300 amino acids to about 710 amino acids, between about 300 amino acids to about 700 amino acids, between about 300 amino acids to about 690 amino acids, between about 300 amino acids to about 680 amino acids, between 30 amino acids to about 670 amino acids, between about 300 amino acids to about 660 amino acids, between about 300 amino acids to about 650 amino acids, between about 300 amino acids to about 640 amino acids, between about 30 amino acids to about 630 amino acids, between about 300 amino acids to about 620 amino acids, between about 300 amino acids to about 610 amino acids, between about 300 amino acids to about 600 amino acids, between about 300 amino acids to about 590 amino acids, between about 300 amino acids to about 580 amino acids, between about 300 amino acids to about 570 amino acids, between about 300 amino acids to about 560 amino acids, between about 300 amino acids to about 550 amino acids, between about 300 amino acids to about 540 amino acids, between about 300 amino acids to about 530 amino acids, between about 300 amino acids to about 520 amino acids, between about 300 amino acids to about 510 amino acids, between about 300 amino acids to about 500 amino acids, between about 300 amino acids to about 490 amino acids, between about 300 amino acids to about 480 amino acids, between about 300 amino acids to about 470 amino acids, between about 300 amino acids to about 460 amino acids, between about 300 amino acids to about 450 amino acids, between about 300 amino acids to about 440 amino acids, between about 300 amino acids to about 430 amino acids, between about 300 amino acids to about 420 amino acids, between about 300 amino acids to about 410 amino acids, between about 300 amino acids to about 400 amino acids, between about 300 amino acids to about 390 amino acids, between about 300 amino acids to about 380 amino acids, between about 300 amino acids to about 370 amino acids, between about 300 amino acids to about 360 amino acids, between about 300 amino acids to about 350 amino acids, between about 300 amino acids to about 340 amino acids, between about 300 amino acids to about 330 amino acids, between about 300 amino acids to about 320 amino acids, between about 300 amino acids to about 310 amino acids, between about 350 amino acids to about 800 amino acids, between about 350 amino acids to about 790 amino acids, between about 350 amino acids to about 780 amino acids, between about 350 amino acids to about 770 amino acids, between about 350 amino acids to about 760 amino acids, between about 350 amino acids to about 750 amino acids, between about 350 amino acids to about 740 amino acids, between about 350 amino acids to about 730 amino acids, between about 350 amino acids to about 720 amino acids, between about 350 amino acids to about 710 amino acids, between about 350 amino acids to about 700 amino acids, between about 350 amino acids to about 690 amino acids, between about 350 amino acids to about 680 amino acids, between 30 amino acids to about 670 amino acids, between about 350 amino acids to about 660 amino acids, between about 350 amino acids to about 650 amino acids, between about 350 amino acids to about 640 amino acids, between about 30 amino acids to about 630 amino acids, between about 350 amino acids to about 620 amino acids, between about 350 amino acids to about 610 amino acids, between about 350 amino acids to about 600 amino acids, between about 350 amino acids to about 590 amino acids, between about 350 amino acids to about 580 amino acids, between about 350 amino acids to about 570 amino acids, between about 350 amino acids to about 560 amino acids, between about 350 amino acids to about 550 amino acids, between about 350 amino acids to about 540 amino acids, between about 350 amino acids to about 530 amino acids, between about 350 amino acids to about 520 amino acids, between about 350 amino acids to about 510 amino acids, between about 350 amino acids to about 500 amino acids, between about 350 amino acids to about 490 amino acids, between about 350 amino acids to about 480 amino acids, between about 350 amino acids to about 470 amino acids, between about 350 amino acids to about 460 amino acids, between about 350 amino acids to about 450 amino acids, between about 350 amino acids to about 440 amino acids, between about 350 amino acids to about 430 amino acids, between about 350 amino acids to about 420 amino acids, between about 350 amino acids to about 410 amino acids, between about 350 amino acids to about 400 amino acids, between about 350 amino acids to about 390 amino acids, between about 350 amino acids to about 380 amino acids, between about 350 amino acids to about 370 amino acids, between about 350 amino acids to about 360 amino acids, between about 380 amino acids to about 800 amino acids, between about 380 amino acids to about 790 amino acids, between about 380 amino acids to about 780 amino acids, between about 380 amino acids to about 770 amino acids, between about 380 amino acids to about 760 amino acids, between about 380 amino acids to about 750 amino acids, between about 380 amino acids to about 740 amino acids, between about 380 amino acids to about 730 amino acids, between about 380 amino acids to about 720 amino acids, between about 380 amino acids to about 710 amino acids, between about 380 amino acids to about 700 amino acids, between about 380 amino acids to about 690 amino acids, between about 380 amino acids to about 680 amino acids, between 30 amino acids to about 670 amino acids, between about 380 amino acids to about 660 amino acids, between about 380 amino acids to about 650 amino acids, between about 380 amino acids to about 640 amino acids, between about 30 amino acids to about 630 amino acids, between about 380 amino acids to about 620 amino acids, between about 380 amino acids to about 610 amino acids, between about 380 amino acids to about 600 amino acids, between about 380 amino acids to about 590 amino acids, between about 380 amino acids to about 580 amino acids, between about 380 amino acids to about 570 amino acids, between about 380 amino acids to about 560 amino acids, between about 380 amino acids to about 550 amino acids, between about 380 amino acids to about 540 amino acids, between about 380 amino acids to about 530 amino acids, between about 380 amino acids to about 520 amino acids, between about 380 amino acids to about 510 amino acids, between about 380 amino acids to about 500 amino acids, between about 380 amino acids to about 490 amino acids, between about 380 amino acids to about 480 amino acids, between about 380 amino acids to about 470 amino acids, between about 380 amino acids to about 460 amino acids, between about 380 amino acids to about 450 amino acids, between about 380 amino acids to about 440 amino acids, between about 380 amino acids to about 430 amino acids, between about 380 amino acids to about 420 amino acids, between about 380 amino acids to about 410 amino acids, between about 380 amino acids to about 400 amino acids, between about 380 amino acids to about 390 amino acids, between about 400 amino acids to about 800 amino acids, between about 400 amino acids to about 790 amino acids, between about 400 amino acids to about 780 amino acids, between about 400 amino acids to about 770 amino acids, between about 400 amino acids to about 760 amino acids, between about 400 amino acids to about 750 amino acids, between about 400 amino acids to about 740 amino acids, between about 400 amino acids to about 730 amino acids, between about 400 amino acids to about 720 amino acids, between about 400 amino acids to about 710 amino acids, between about 400 amino acids to about 700 amino acids, between about 400 amino acids to about 690 amino acids, between about 400 amino acids to about 680 amino acids, between 30 amino acids to about 670 amino acids, between about 400 amino acids to about 660 amino acids, between about 400 amino acids to about 650 amino acids, between about 400 amino acids to about 640 amino acids, between about 30 amino acids to about 630 amino acids, between about 400 amino acids to about 620 amino acids, between about 400 amino acids to about 610 amino acids, between about 400 amino acids to about 600 amino acids, between about 400 amino acids to about 590 amino acids, between about 400 amino acids to about 580 amino acids, between about 400 amino acids to about 570 amino acids, between about 400 amino acids to about 560 amino acids, between about 400 amino acids to about 550 amino acids, between about 400 amino acids to about 540 amino acids, between about 400 amino acids to about 530 amino acids, between about 400 amino acids to about 520 amino acids, between about 400 amino acids to about 510 amino acids, between about 400 amino acids to about 500 amino acids, between about 400 amino acids to about 490 amino acids, between about 400 amino acids to about 480 amino acids, between about 400 amino acids to about 470 amino acids, between about 400 amino acids to about 460 amino acids, between about 400 amino acids to about 450 amino acids, between about 400 amino acids to about 440 amino acids, between about 400 amino acids to about 430 amino acids, between about 400 amino acids to about 420 amino acids, between about 400 amino acids to about 410 amino acids, between about 450 amino acids to about 800 amino acids, between about 450 amino acids to about 790 amino acids, between about 450 amino acids to about 780 amino acids, between about 450 amino acids to about 770 amino acids, between about 450 amino acids to about 760 amino acids, between about 450 amino acids to about 750 amino acids, between about 450 amino acids to about 740 amino acids, between about 450 amino acids to about 730 amino acids, between about 450 amino acids to about 720 amino acids, between about 450 amino acids to about 710 amino acids, between about 450 amino acids to about 700 amino acids, between about 450 amino acids to about 690 amino acids, between about 450 amino acids to about 680 amino acids, between 30 amino acids to about 670 amino acids, between about 450 amino acids to about 660 amino acids, between about 450 amino acids to about 650 amino acids, between about 450 amino acids to about 640 amino acids, between about 30 amino acids to about 630 amino acids, between about 450 amino acids to about 620 amino acids, between about 450 amino acids to about 610 amino acids, between about 450 amino acids to about 600 amino acids, between about 450 amino acids to about 590 amino acids, between about 450 amino acids to about 580 amino acids, between about 450 amino acids to about 570 amino acids, between about 450 amino acids to about 560 amino acids, between about 450 amino acids to about 550 amino acids, between about 450 amino acids to about 540 amino acids, between about 450 amino acids to about 530 amino acids, between about 450 amino acids to about 520 amino acids, between about 450 amino acids to about 510 amino acids, between about 450 amino acids to about 500 amino acids, between about 450 amino acids to about 490 amino acids, between about 450 amino acids to about 480 amino acids, between about 450 amino acids to about 470 amino acids, between about 450 amino acids to about 460 amino acids, between about 480 amino acids to about 800 amino acids, between about 480 amino acids to about 790 amino acids, between about 480 amino acids to about 780 amino acids, between about 480 amino acids to about 770 amino acids, between about 480 amino acids to about 760 amino acids, between about 480 amino acids to about 750 amino acids, between about 480 amino acids to about 740 amino acids, between about 480 amino acids to about 730 amino acids, between about 480 amino acids to about 720 amino acids, between about 480 amino acids to about 710 amino acids, between about 480 amino acids to about 700 amino acids, between about 480 amino acids to about 690 amino acids, between about 480 amino acids to about 680 amino acids, between 30 amino acids to about 670 amino acids, between about 480 amino acids to about 660 amino acids, between about 480 amino acids to about 650 amino acids, between about 480 amino acids to about 640 amino acids, between about 30 amino acids to about 630 amino acids, between about 480 amino acids to about 620 amino acids, between about 480 amino acids to about 610 amino acids, between about 480 amino acids to about 600 amino acids, between about 480 amino acids to about 590 amino acids, between about 480 amino acids to about 580 amino acids, between about 480 amino acids to about 570 amino acids, between about 480 amino acids to about 560 amino acids, between about 480 amino acids to about 550 amino acids, between about 480 amino acids to about 540 amino acids, between about 480 amino acids to about 530 amino acids, between about 480 amino acids to about 520 amino acids, between about 480 amino acids to about 510 amino acids, between about 480 amino acids to about 500 amino acids, between about 480 amino acids to about 490 amino acids, between about 50 amino acids to about 800 amino acids, between about 50 amino acids to about 790 amino acids, between about 50 amino acids to about 780 amino acids, between about 50 amino acids to about 770 amino acids, between about 50 amino acids to about 760 amino acids, between about 50 amino acids to about 750 amino acids, between about 50 amino acids to about 740 amino acids, between about 50 amino acids to about 730 amino acids, between about 50 amino acids to about 720 amino acids, between about 50 amino acids to about 710 amino acids, between about 50 amino acids to about 700 amino acids, between about 50 amino acids to about 690 amino acids, between about 50 amino acids to about 680 amino acids, between 30 amino acids to about 670 amino acids, between about 50 amino acids to about 660 amino acids, between about 50 amino acids to about 650 amino acids, between about 50 amino acids to about 640 amino acids, between about 30 amino acids to about 630 amino acids, between about 50 amino acids to about 620 amino acids, between about 50 amino acids to about 610 amino acids, between about 50 amino acids to about 600 amino acids, between about 50 amino acids to about 590 amino acids, between about 50 amino acids to about 580 amino acids, between about 50 amino acids to about 570 amino acids, between about 50 amino acids to about 560 amino acids, between about 50 amino acids to about 550 amino acids, between about 50 amino acids to about 540 amino acids, between about 50 amino acids to about 530 amino acids, between about 50 amino acids to about 520 amino acids, between about 50 amino acids to about 510 amino acids, between about 550 amino acids to about 800 amino acids, between about 550 amino acids to about 790 amino acids, between about 550 amino acids to about 780 amino acids, between about 550 amino acids to about 770 amino acids, between about 550 amino acids to about 760 amino acids, between about 550 amino acids to about 750 amino acids, between about 550 amino acids to about 740 amino acids, between about 550 amino acids to about 730 amino acids, between about 550 amino acids to about 720 amino acids, between about 550 amino acids to about 710 amino acids, between about 550 amino acids to about 700 amino acids, between about 550 amino acids to about 690 amino acids, between about 550 amino acids to about 680 amino acids, between 30 amino acids to about 670 amino acids, between about 550 amino acids to about 660 amino acids, between about 550 amino acids to about 650 amino acids, between about 550 amino acids to about 640 amino acids, between about 30 amino acids to about 630 amino acids, between about 550 amino acids to about 620 amino acids, between about 550 amino acids to about 610 amino acids, between about 550 amino acids to about 600 amino acids, between about 550 amino acids to about 590 amino acids, between about 550 amino acids to about 580 amino acids, between about 550 amino acids to about 570 amino acids, between about 550 amino acids to about 560 amino acids, between about 580 amino acids to about 800 amino acids, between about 580 amino acids to about 790 amino acids, between about 580 amino acids to about 780 amino acids, between about 580 amino acids to about 770 amino acids, between about 580 amino acids to about 760 amino acids, between about 580 amino acids to about 750 amino acids, between about 580 amino acids to about 740 amino acids, between about 580 amino acids to about 730 amino acids, between about 580 amino acids to about 720 amino acids, between about 580 amino acids to about 710 amino acids, between about 580 amino acids to about 700 amino acids, between about 580 amino acids to about 690 amino acids, between about 580 amino acids to about 680 amino acids, between 30 amino acids to about 670 amino acids, between about 580 amino acids to about 660 amino acids, between about 580 amino acids to about 650 amino acids, between about 580 amino acids to about 640 amino acids, between about 30 amino acids to about 630 amino acids, between about 580 amino acids to about 620 amino acids, between about 580 amino acids to about 610 amino acids, between about 580 amino acids to about 600 amino acids, between about 580 amino acids to about 590 amino acids, between about 600 amino acids to about 800 amino acids, between about 600 amino acids to about 790 amino acids, between about 600 amino acids to about 780 amino acids, between about 600 amino acids to about 770 amino acids, between about 600 amino acids to about 760 amino acids, between about 600 amino acids to about 750 amino acids, between about 600 amino acids to about 740 amino acids, between about 600 amino acids to about 730 amino acids, between about 600 amino acids to about 720 amino acids, between about 600 amino acids to about 710 amino acids, between about 600 amino acids to about 700 amino acids, between about 600 amino acids to about 690 amino acids, between about 600 amino acids to about 680 amino acids, between 30 amino acids to about 670 amino acids, between about 600 amino acids to about 660 amino acids, between about 600 amino acids to about 650 amino acids, between about 600 amino acids to about 640 amino acids, between about 30 amino acids to about 630 amino acids, between about 600 amino acids to about 620 amino acids, between about 600 amino acids to about 610 amino acids, between about 650 amino acids to about 800 amino acids, between about 650 amino acids to about 790 amino acids, between about 650 amino acids to about 780 amino acids, between about 650 amino acids to about 770 amino acids, between about 650 amino acids to about 760 amino acids, between about 650 amino acids to about 750 amino acids, between about 650 amino acids to about 740 amino acids, between about 650 amino acids to about 730 amino acids, between about 650 amino acids to about 720 amino acids, between about 650 amino acids to about 710 amino acids, between about 650 amino acids to about 700 amino acids, between about 650 amino acids to about 690 amino acids, between about 650 amino acids to about 680 amino acids, between 30 amino acids to about 670 amino acids, between about 650 amino acids to about 660 amino acids, between about 680 amino acids to about 800 amino acids, between about 680 amino acids to about 790 amino acids, between about 680 amino acids to about 780 amino acids, between about 680 amino acids to about 770 amino acids, between about 680 amino acids to about 760 amino acids, between about 680 amino acids to about 750 amino acids, between about 680 amino acids to about 740 amino acids, between about 680 amino acids to about 730 amino acids, between about 680 amino acids to about 720 amino acids, between about 680 amino acids to about 710 amino acids, between about 680 amino acids to about 700 amino acids, between about 680 amino acids to about 690 amino acids, between about 700 amino acids to about 800 amino acids, between about 700 amino acids to about 790 amino acids, between about 700 amino acids to about 780 amino acids, between about 700 amino acids to about 770 amino acids, between about 700 amino acids to about 760 amino acids, between about 700 amino acids to about 750 amino acids, between about 700 amino acids to about 740 amino acids, between about 700 amino acids to about 730 amino acids, between about 700 amino acids to about 720 amino acids, between about 700 amino acids to about 710 amino acids, between about 750 amino acids to about 800 amino acids, between about 750 amino acids to about 790 amino acids, between about 750 amino acids to about 780 amino acids, between about 750 amino acids to about 770 amino acids, between about 750 amino acids to about 760 amino acids, or between about 780 amino acids to about 800 amino acids) in length. In some examples, the second vector further includes a poly(A) sequence.

[0235] In some examples where the number of different vectors in the composition is two, the N-terminal portion encoded by one of the two vectors can include a portion including amino acid position 1 to about amino acid position 800, about amino acid position 790, about amino acid position 780, about amino acid position 770, about amino acid position 760, about amino acid position 750, about amino acid position 740, about amino acid position 730, about amino acid position 720, about amino acid position 710, about amino acid position 700, about amino acid position 690, about amino acid position 680, about amino acid position 670, about amino acid position 660, about amino acid position 650, about amino acid position 640, about amino acid position 630, about amino acid position 620, about amino acid position 610, about amino acid position 600, about amino acid position 590, about amino acid position 580, about amino acid position 570, about amino acid position 560, about amino acid position 550, about amino acid position 540, about amino acid position 530, about amino acid position 520, about amino acid position 510, about amino acid position 500, about amino acid position 490, about amino acid position 480, about amino acid position 470, about amino acid position 460, about amino acid position 450, about amino acid position 440, about amino acid position 430, about amino acid position 420, about amino acid position 410, about amino acid position 400, about amino acid position 390, about amino acid position 380, about amino acid position 370, about amino acid position 360, about amino acid position 350, about amino acid position 340, about amino acid position 330, about amino acid position 320, about amino acid position 310, about amino acid position 300, about amino acid position 290, about amino acid position 280, about amino acid position 270, about amino acid position 260, about amino acid position 250, about amino acid position 240, about amino acid position 230, about amino acid position 220, about amino acid position 210, about amino acid position 200, about amino acid position 190, about amino acid position 180, about amino acid position 170, about amino acid position 160, about amino acid position 150, about amino acid position 140, about amino acid position 130, about amino acid position 120, about amino acid position 110, about amino acid position 100, about amino acid position 90, about amino acid position 80, about amino acid position 70, about amino acid position 60, about amino acid position 50, or about amino acid position 40 of a wildtype hair cell target protein (e.g., SEQ ID NO: 8, SEQ ID NO: 9, SEQ ID NO: 10, SEQ ID NO: 11, SEQ ID NO: 12, SEQ ID NO: 20, SEQ ID NO: 23, SEQ ID NO: 24, SEQ ID NO: 25, SEQ ID NO: 26, SEQ ID NO: 27, SEQ ID NO: 28, SEQ ID NO: 30, SEQ ID NO: 31, SEQ ID NO: 32, SEQ ID NO: 34, SEQ ID NO: 39, SEQ ID NO: 41, SEQ ID NO: 43, SEQ ID NO: 45, SEQ ID NO: 48, SEQ ID NO: 51, SEQ ID NO: 53, SEQ ID NO: 55, SEQ ID NO: 57, SEQ ID NO: 59, SEQ ID NO: 61, SEQ ID NO: 64, SEQ ID NO: 66, SEQ ID NO: 68, SEQ ID NO: 69, SEQ ID NO: 70, SEQ ID NO: 72, SEQ ID NO: 74, SEQ ID NO: 76, SEQ ID NO: 77, SEQ ID NO: 78, or SEQ ID NO: 79).

[0236] In some examples where the number of different vectors in the composition is two, the N-terminal portion of the precursor hair cell target protein can include a portion including amino acid position 1 to amino acid position 300, amino acid position 1 to amino acid position 310, amino acid position 1 to about amino acid position 320, amino acid position 1 to about amino acid position 330, amino acid position 1 to about amino acid position 340, amino acid position 1 to about amino acid position 350, amino acid position 1 to about amino acid position 360, amino acid position 1 to about amino acid position 370, amino acid position 1 to about amino acid position 380, amino acid position 1 to about amino acid position 390, amino acid position 1 to about amino acid position 400, amino acid position 1 to about amino acid position 410, amino acid position 1 to about amino acid position 420, amino acid position 1 to about amino acid position 430, amino acid position 1 to about amino acid position 440, amino acid position 1 to about amino acid position 450, amino acid position 1 to about amino acid position 460, amino acid position 1 to about amino acid position 470, amino acid position 1 to about amino acid position 480, amino acid position 1 to about amino acid position 490, amino acid position 1 to about amino acid position 500, amino acid position 1 to about amino acid position 510, amino acid position 1 to about amino acid position 520, amino acid position 1 to about amino acid position 530, amino acid position 1 to about amino acid position 540, amino acid position 1 to about amino acid position 550, amino acid position 1 to about amino acid position 560, amino acid position 1 to about amino acid position 570, amino acid position 1 to about amino acid position 580, amino acid position 1 to about amino acid position 590, amino acid position 1 to about amino acid position 600, amino acid position 1 to about amino acid position 610, amino acid position 1 to about amino acid position 620, amino acid position 1 to about amino acid position 630, amino acid position 1 to about amino acid position 640, amino acid position 1 to about amino acid position 650, amino acid position 1 to about amino acid position 660, amino acid position 1 to about amino acid position 670, amino acid position 1 to about amino acid position 680, amino acid position 1 to about amino acid position 690, amino acid position 1 to about amino acid position 700, amino acid position 1 to about amino acid position 710, amino acid position 1 to about amino acid position 720, amino acid position 1 to about amino acid position 730, amino acid position 1 to about amino acid position 740, amino acid position 1 to about amino acid position 750, amino acid position 1 to about amino acid position 760, amino acid position 1 to about amino acid position 770, amino acid position 1 to about amino acid position 780, amino acid position 1 to about amino acid position 790, amino acid position 1 to about amino acid position 800 of a wildtype hair cell target protein (e.g., SEQ ID NO: 8, SEQ ID NO: 9, SEQ ID NO: 10, SEQ ID NO: 11, SEQ ID NO: 12, SEQ ID NO: 20, SEQ ID NO: 23, SEQ ID NO: 24, SEQ ID NO: 25, SEQ ID NO: 26, SEQ ID NO: 27, SEQ ID NO: 28, SEQ ID NO: 30, SEQ ID NO: 31, SEQ ID NO: 32, SEQ ID NO: 34, SEQ ID NO: 35, SEQ ID NO: 41, SEQ ID NO: 43, SEQ ID NO: 45, SEQ ID NO: 48, SEQ ID NO: 51, SEQ ID NO: 53, SEQ ID NO: 55, SEQ ID NO: 57, SEQ ID NO: 59, SEQ ID NO: 61, SEQ ID NO: 64, SEQ ID NO: 66, SEQ ID NO: 68, SEQ ID NO: 69, SEQ ID NO: 70, SEQ ID NO: 72, SEQ ID NO: 74, SEQ ID NO: 76, SEQ ID NO: 77, SEQ ID NO: 78, SEQ ID NO: 79).

[0237] In some examples where the number of different vectors in the composition is two, the N-terminal portion encoded by one of the two vectors can include a portion including amino acid position 1 to about amino acid position 800, about amino acid position 790, about amino acid position 780, about amino acid position 770, about amino acid position 760, about amino acid position 750, about amino acid position 740, about amino acid position 730, about amino acid position 720, about amino acid position 710, about amino acid position 700, about amino acid position 690, about amino acid position 680, about amino acid position 670, about amino acid position 660, about amino acid position 650, about amino acid position 640, about amino acid position 630, about amino acid position 620, about amino acid position 610, about amino acid position 600, about amino acid position 590, about amino acid position 580, about amino acid position 570, about amino acid position 560, about amino acid position 550, about amino acid position 540, about amino acid position 530, about amino acid position 520, about amino acid position 510, about amino acid position 500, about amino acid position 490, about amino acid position 480, about amino acid position 470, about amino acid position 460, about amino acid position 450, about amino acid position 440, about amino acid position 430, about amino acid position 420, about amino acid position 410, about amino acid position 400, about amino acid position 390, about amino acid position 380, about amino acid position 370, about amino acid position 360, about amino acid position 350, about amino acid position 340, about amino acid position 330, about amino acid position 320, about amino acid position 310, about amino acid position 300, about amino acid position 290, about amino acid position 280, about amino acid position 270, about amino acid position 260, about amino acid position 250, about amino acid position 240, about amino acid position 230, about amino acid position 220, about amino acid position 210, about amino acid position 200, about amino acid position 190, about amino acid position 180, about amino acid position 170, about amino acid position 160, about amino acid position 150, about amino acid position 140, about amino acid position 130, about amino acid position 120, about amino acid position 110, about amino acid position 100, about amino acid position 90, about amino acid position 80, about amino acid position 70, about amino acid position 60, about amino acid position 50, or about amino acid position 40 of a wildtype supporting cell target protein (e.g., SEQ ID NO: 1 or SEQ ID NO: 4).

[0238] In some examples where the number of different vectors in the composition is two, the N-terminal portion of the precursor supporting cell target protein can include a portion including amino acid position 1 to amino acid position 300, amino acid position 1 to amino acid position 310, amino acid position 1 to about amino acid position 320, amino acid position 1 to about amino acid position 330, amino acid position 1 to about amino acid position 340, amino acid position 1 to about amino acid position 350, amino acid position 1 to about amino acid position 360, amino acid position 1 to about amino acid position 370, amino acid position 1 to about amino acid position 380, amino acid position 1 to about amino acid position 390, amino acid position 1 to about amino acid position 400, amino acid position 1 to about amino acid position 410, amino acid position 1 to about amino acid position 420, amino acid position 1 to about amino acid position 430, amino acid position 1 to about amino acid position 440, amino acid position 1 to about amino acid position 450, amino acid position 1 to about amino acid position 460, amino acid position 1 to about amino acid position 470, amino acid position 1 to about amino acid position 480, amino acid position 1 to about amino acid position 490, amino acid position 1 to about amino acid position 500, amino acid position 1 to about amino acid position 510, amino acid position 1 to about amino acid position 520, amino acid position 1 to about amino acid position 530, amino acid position 1 to about amino acid position 540, amino acid position 1 to about amino acid position 550, amino acid position 1 to about amino acid position 560, amino acid position 1 to about amino acid position 570, amino acid position 1 to about amino acid position 580, amino acid position 1 to about amino acid position 590, amino acid position 1 to about amino acid position 600, amino acid position 1 to about amino acid position 610, amino acid position 1 to about amino acid position 620, amino acid position 1 to about amino acid position 630, amino acid position 1 to about amino acid position 640, amino acid position 1 to about amino acid position 650, amino acid position 1 to about amino acid position 660, amino acid position 1 to about amino acid position 670, amino acid position 1 to about amino acid position 680, amino acid position 1 to about amino acid position 690, amino acid position 1 to about amino acid position 700, amino acid position 1 to about amino acid position 710, amino acid position 1 to about amino acid position 720, amino acid position 1 to about amino acid position 730, amino acid position 1 to about amino acid position 740, amino acid position 1 to about amino acid position 750, amino acid position 1 to about amino acid position 760, amino acid position 1 to about amino acid position 770, amino acid position 1 to about amino acid position 780, amino acid position 1 to about amino acid position 790, amino acid position 1 to about amino acid position 800 of a wildtype supporting cell target protein (e.g., SEQ ID NO: 1 or SEQ ID NO: 4).

[0239] As used herein, the term “vector” means a composition including a polynucleotide capable of carrying at least one exogenous nucleic acid fragment, e.g., a plasmid vector, a transposon, a cosmid, an artificial chromosome (e.g., a human artificial chromosome (HAC), a yeast artificial chromosome (YAC), a bacterial artificial chromosome (BAC), or a P1-derived artificial chromosome (PAC)) or a viral vector (e.g., any adenoviral vectors (e.g., pSV or pCMV vectors), any retroviral vectors as described herein) and any Gateway® vectors. A vector can, e.g., include sufficient cis-acting elements for expression; other elements for expression can be supplied by the host primate cell or in an in vitro expression system. The term “vector” includes any genetic element (e.g., a plasmid, a transposon, a cosmid, an artificial chromosome, or a viral vector, etc.) that is capable of replicating when associated with the proper control elements. Thus, the term includes cloning and expression vectors, as well as viral vectors (e.g., an adeno-associated virus (AAV) vector, an adenovirus vector, a lentivirus vector, or a retrovirus vector).

[0240] Vectors include all those known in the art, including cosmids, plasmids (e.g., naked or contained in liposomes) and viruses (e.g., lentiviruses, retroviruses, adenoviruses, and adeno-associated viruses) that incorporate the recombinant polynucleotide. Skilled practitioners will be capable of selecting suitable vectors and primate cells for making any of the nucleic acids described herein.

[0241] In some embodiments the vector is a plasmid (i.e. a circular DNA molecule that can autonomously replicate inside a cell). In some embodiments, the vector can be a cosmid (e.g., pWE and sCos series (Wahl et al. (1987), Evans et al. (1989)).

[0242] In some embodiments, the vector(s) is a viral vector (e.g., adeno-associated virus, adenovirus, lentivirus, and retrovirus). Non-limiting examples of viral vectors are described herein. In some embodiments, the vector(s) is an adeno-associated viral vector (AAV) (see, e.g., Asokan et al., Mol. Ther. 20: 699-7080, 2012). “Recombinant AAV vectors” or “rAAVs” are typically composed of, at a minimum, a transgene or a portion thereof and a regulatory sequence, and optionally 5′ and 3′ AAV inverted terminal repeats (ITRs). Such a recombinant AAV vector is packaged into a capsid and delivered to a selected target cell (e.g., an outer hair cell).

[0243] The AAV sequences of the vector typically include the cis-acting 5′ and 3′ ITR sequences (See, e.g., B. J. Carter, in “Handbook of Parvoviruses”, ed., P. Tijsser, CRC Press, pp. 155 168, 1990). Typical AAV ITR sequences are about 145 nucleotides in length. In some embodiments, at least 75% of a typical ITR sequence (e.g., at least 80%, at least 85%, at least 90%, or at least 95%) is incorporated into the AAV vector. The ability to modify these ITR sequences is within the skill of the art. (See, e.g., texts such as Sambrook et al., “Molecular Cloning. A Laboratory Manual”, 2d ed., Cold Spring Harbor Laboratory, New York, 1989; and K. Fisher et al., J Virol. 70:520 532, 1996). In some embodiments, any of the coding sequences described herein are flanked by 5′ and 3′ AAV ITR sequences in the AAV vectors. The AAV ITR sequences may be obtained from any known AAV, including presently identified AAV types.

[0244] AAV vectors as described herein may include any of the regulatory elements described herein (e.g., one or more of a promoter, a polyA sequence, and an IRES).

[0245] In some embodiments, the AAV vector is selected from the group consisting of: an AAV1 vector, an AAV2 vector, an AAV3 vector, an AAV4 vector, an AAV5 vector, an AAV6 vector, an AAV7 vector, an AAV8 vector, an AAV9 vector, an AAV2.7m8 vector, an AAV8BP2 vector, and an AAV293 vector. Additional exemplary AAV vectors that can be used herein are known in the art. See, e.g., Kanaan et al., Mol. Ther. Nucleic Acids 8:184-197, 2017; Li et al., Mol. Ther. 16(7): 1252-1260; Adachi et al., Nat. Commun. 5: 3075, 2014; Isgrig et al., Nat. Commun. 10(1): 427, 2019; and Gao et al., J. Virol. 78(12): 6381-6388.

[0246] In some embodiments, the vector(s) is an adenovirus (see, e.g., Dmitriev et al. (1998) J. Virol. 72: 9706-9713; and Poulin et al., J. Virol 8: 10074-10086, 2010). In some embodiments, the vector(s) is a retrovirus (see, e.g., Maier et al. (2010) Future Microbiol 5: 1507-23).

[0247] The vectors provided herein can be of different sizes. The choice of vector that is used in any of the compositions, kits, and methods described herein may depend on the size of the vector.

[0248] In some embodiments, the vector(s) is a plasmid and can include a total length of up to about 1 kb, up to about 2 kb, up to about 3 kb, up to about 4 kb, up to about 5 kb, up to about 6 kb, up to about 7 kb, up to about 8 kb, up to about 9 kb, up to about 10 kb, up to about 11 kb, up to about 12 kb, up to about 13 kb, up to about 14 kb, or up to about 15 kb. In some embodiments, the vector(s) is a plasmid and can have a total length in a range of about 1 kb to about 2 kb, about 1 kb to about 3 kb, about 1 kb to about 4 kb, about 1 kb to about 5 kb, about 1 kb to about 6 kb, about 1 kb to about 7 kb, about 1 kb to about 8 kb, about 1 kb to about 9 kb, about 1 kb to about 10 kb, about 1 kb to about 11 kb, about 1 kb to about 12 kb, about 1 kb to about 13 kb, about 1 kb to about 14 kb, or about 1 kb to about 15 kb.

[0249] In some embodiments, the vector(s) is a viral vector and can have a total number of nucleotides of up to 10 kb. In some embodiments, the viral vector(s) can have a total number of nucleotides in the range of about 1 kb to about 2 kb, 1 kb to about 3 kb, about 1 kb to about 4 kb, about 1 kb to about 5 kb, about 1 kb to about 6 kb, about 1 kb to about 7 kb, about 1 kb to about 8 kb, about 1 kb to about 9 kb, about 1 kb to about 10 kb, about 2 kb to about 3 kb, about 2 kb to about 4 kb, about 2 kb to about 5 kb, about 2 kb to about 6 kb, about 2 kb to about 7 kb, about 2 kb to about 8 kb, about 2 kb to about 9 kb, about 2 kb to about 10 kb, about 3 kb to about 4 kb, about 3 kb to about 5 kb, about 3 kb to about 6 kb, about 3 kb to about 7 kb, about 3 kb to about 8 kb, about 3 kb to about 9 kb, about 3 kb to about 10 kb, about 4 kb to about 5 kb, about 4 kb to about 6 kb, about 4 kb to about 7 kb, about 4 kb to about 8 kb, about 4 kb to about 9 kb, about 4 kb to about 10 kb, about 5 kb to about 6 kb, about 5 kb to about 7 kb, about 5 kb to about 8 kb, about 5 kb to about 9 kb, about 5 kb to about 10 kb, about 6 kb to about 7 kb, about 6 kb to about 8 kb, about 6 kb to about 9 kb, about 6 kb to about 10 kb, about 7 kb to about 8 kb, about 7 kb to about 9 kb, about 7 kb to about 10 kb, about 8 kb to about 9 kb, about 8 kb to about 10 kb, or about 9 kb to about 10 kb.

[0250] In some embodiments, the vector(s) is a lentivirus and can have a total number of nucleotides of up to 8 kb. In some examples, the lentivirus(es) can have a total number of nucleotides of about 1 kb to about 2 kb, about 1 kb to about 3 kb, about 1 kb to about 4 kb, about 1 kb to about 5 kb, about 1 kb to about 6 kb, about 1 kb to about 7 kb, about 1 kb to about 8 kb, about 2 kb to about 3 kb, about 2 kb to about 4 kb, about 2 kb to about 5 kb, about 2 kb to about 6 kb, about 2 kb to about 7 kb, about 2 kb to about 8 kb, about 3 kb to about 4 kb, about 3 kb to about 5 kb, about 3 kb to about 6 kb, about 3 kb to about 7 kb, about 3 kb to about 8 kb, about 4 kb to about 5 kb, about 4 kb to about 6 kb, about 4 kb to about 7 kb, about 4 kb to about 8 kb, about 5 kb to about 6 kb, about 5 kb to about 7 kb, about 5 kb to about 8 kb, about 6 kb to about 8 kb, about 6 kb to about 7 kb, or about 7 kb to about 8 kb.

[0251] In some embodiments, the vector(s) is an adenovirus and can have a total number of nucleotides of up to 8 kb. In some embodiments, the adenovirus(es) can have a total number of nucleotides in the range of about 1 kb to about 2 kb, about 1 kb to about 3 kb, about 1 kb to about 4 kb, about 1 kb to about 5 kb, about 1 kb to about 6 kb, about 1 kb to about 7 kb, about 1 kb to about 8 kb, about 2 kb to about 3 kb, about 2 kb to about 4 kb, about 2 kb to about 5 kb, about 2 kb to about 6 kb, about 2 kb to about 7 kb, about 2 kb to about 8 kb, about 3 kb to about 4 kb, about 3 kb to about 5 kb, about 3 kb to about 6 kb, about 3 kb to about 7 kb, about 3 kb to about 8 kb, about 4 kb to about 5 kb, about 4 kb to about 6 kb, about 4 kb to about 7 kb, about 4 kb to about 8 kb, about 5 kb to about 6 kb, about 5 kb to about 7 kb, about 5 kb to about 8 kb, about 6 kb to about 7 kb, about 6 kb to about 8 kb, or about 7 kb to about 8 kb.

[0252] In some embodiments, the vector(s) is an adeno-associated virus (AAV vector) and can include a total number of nucleotides of up to 5 kb. In some embodiments, the AAV vector(s) can include a total number of nucleotides in the range of about 1 kb to about 2 kb, about 1 kb to about 3 kb, about 1 kb to about 4 kb, about 1 kb to about 5 kb, about 2 kb to about 3 kb, about 2 kb to about 4 kb, about 2 kb to about 5 kb, about 3 kb to about 4 kb, about 3 kb to about 5 kb, or about 4 kb to about 5 kb.

[0253] In some embodiments of any of the compositions, kits, and methods provided herein, the at least two different vectors can be substantially the same type of vector and may differ in size. In some embodiments, the at least two different vectors can be different types of vector, and may have substantially the same size or have different sizes.

[0254] In some embodiments, any of the at least two vectors can have a total number of nucleotides in the range of about 500 nucleotides to about 10,000 nucleotides, about 500 nucleotides to about 9,500 nucleotides, about 500 nucleotides to about 9,000 nucleotides, about 500 nucleotides to about 8,500 nucleotides, about 500 nucleotides to about 8,000 nucleotides, about 500 nucleotides to about 7,800 nucleotides, about 500 nucleotides to about 7,600 nucleotides, about 500 nucleotides to about 7,400 nucleotides, about 500 nucleotides to about 7,200 nucleotides, about 500 nucleotides to about 7,000 nucleotides, about 500 nucleotides to about 6,800 nucleotides, about 500 nucleotides to about 6,600 nucleotides, about 500 nucleotides to about 6,400 nucleotides, about 500 nucleotides to about 6,200 nucleotides, about 500 nucleotides to about 6,000 nucleotides, about 500 nucleotides to about 5,800 nucleotides, about 500 nucleotides to about 5,600 nucleotides, about 500 nucleotides to about 5,400 nucleotides, about 500 nucleotides to about 5,200 nucleotides, about 500 nucleotides to about 5,000 nucleotides, about 500 nucleotides to about 4,800 nucleotides, about 4,600 nucleotides, about 500 nucleotides to about 4,400 nucleotides, about 500 nucleotides to about 4,200 nucleotides, about 500 nucleotides to about 4,000 nucleotides, about 500 nucleotides to about 3,800 nucleotides, about 500 nucleotides to about 3,600 nucleotides, about 500 nucleotides to about 3,400 nucleotides, about 500 nucleotides to about 3,200 nucleotides, about 500 nucleotides to about 3,000 nucleotides, about 500 nucleotides to about 2,800 nucleotides, about 500 nucleotides to about 2,600 nucleotides, about 500 nucleotides to about 2,400 nucleotides, about 500 nucleotides to about 2,200 nucleotides, about 500 nucleotides to about 2,000 nucleotides, about 500 nucleotides to about 1,800 nucleotides, about 500 nucleotides to about 1,600 nucleotides, about 500 nucleotides to about 1,400 nucleotides, about 500 nucleotides to about 1,200 nucleotides, about 500 nucleotides to about 1,000 nucleotides, about 500 nucleotides to about 800 nucleotides, about 800 nucleotides to about 10,000 nucleotides, about 800 nucleotides to about 9,500 nucleotides, about 800 nucleotides to about 9,000 nucleotides, about 800 nucleotides to about 8,500 nucleotides, about 800 nucleotides to about 8,000 nucleotides, about 800 nucleotides to about 7,800 nucleotides, about 800 nucleotides to about 7,600 nucleotides, about 800 nucleotides to about 7,400 nucleotides, about 800 nucleotides to about 7,200 nucleotides, about 800 nucleotides to about 7,000 nucleotides, about 800 nucleotides to about 6,800 nucleotides, about 800 nucleotides to about 6,600 nucleotides, about 800 nucleotides to about 6,400 nucleotides, about 800 nucleotides to about 6,200 nucleotides, about 800 nucleotides to about 6,000 nucleotides, about 800 nucleotides to about 5,800 nucleotides, about 800 nucleotides to about 5,600 nucleotides, about 800 nucleotides to about 5,400 nucleotides, about 800 nucleotides to about 5,200 nucleotides, about 800 nucleotides to about 5,000 nucleotides, about 800 nucleotides to about 4,800 nucleotides, about 800 nucleotides to about 4,600 nucleotides, about 800 nucleotides to about 4,400 nucleotides, about 800 nucleotides to about 4,200 nucleotides, about 800 nucleotides to about 4,000 nucleotides, about 800 nucleotides to about 3,800 nucleotides, about 800 nucleotides to about 3,600 nucleotides, about 800 nucleotides to about 3,400 nucleotides, about 800 nucleotides to about 3,200 nucleotides, about 800 nucleotides to about 3,000 nucleotides, about 800 nucleotides to about 2,800 nucleotides, about 800 nucleotides to about 2,600 nucleotides, about 800 nucleotides to about 2,400 nucleotides, about 800 nucleotides to about 2,200 nucleotides, about 800 nucleotides to about 2,000 nucleotides, about 800 nucleotides to about 1,800 nucleotides, about 800 nucleotides to about 1,600 nucleotides, about 800 nucleotides to about 1,400 nucleotides, about 800 nucleotides to about 1,200 nucleotides, about 800 nucleotides to about 1,000 nucleotides, about 1,000 nucleotides to about 10,000 nucleotides, about 1,000 nucleotides to about 9,000 nucleotides, about 1,000 nucleotides to about 8,500 nucleotides, about 1,000 nucleotides to about 8,000 nucleotides, about 1,000 nucleotides to about 7,800 nucleotides, about 1,000 nucleotides to about 7,600 nucleotides, about 1,000 nucleotides to about 7,400 nucleotides, about 1,000 nucleotides to about 7,200 nucleotides, about 1,000 nucleotides to about 7,000 nucleotides, about 1,000 nucleotides to about 6,800 nucleotides, about 1,000 nucleotides to about 6,600 nucleotides, about 1,000 nucleotides to about 6,400 nucleotides, about 1,000 nucleotides to about 6,200 nucleotides, about 1,000 nucleotides to about 6,000 nucleotides, about 1,000 nucleotides to about 5,800 nucleotides, about 1,000 nucleotides to about 5,600 nucleotides, about 1,000 nucleotides to about 5,400 nucleotides, about 1,000 nucleotides to about 5,200 nucleotides, about 1,000 nucleotides to about 5,000 nucleotides, about 1,000 nucleotides to about 4,800 nucleotides, about 1,000 nucleotides to about 4,600 nucleotides, about 1,000 nucleotides to about 4,400 nucleotides, about 1,000 nucleotides to about 4,200 nucleotides, about 1,000 nucleotides to about 4,000 nucleotides, about 1,000 nucleotides to about 3,800 nucleotides, about 1,000 nucleotides to about 3,600 nucleotides, about 1,000 nucleotides to about 3,400 nucleotides, about 1,000 nucleotides to about 3,200 nucleotides, about 1,000 nucleotides to about 3,000 nucleotides, about 1,000 nucleotides to about 2,600 nucleotides, about 1,000 nucleotides to about 2,400 nucleotides, about 1,000 nucleotides to about 2,200 nucleotides, about 1,000 nucleotides to about 2,000 nucleotides, about 1,000 nucleotides to about 1,800 nucleotides, about 1,000 nucleotides to about 1,600 nucleotides, about 1,000 nucleotides to about 1,400 nucleotides, about 1,000 nucleotides to about 1,200 nucleotides, about 1,200 nucleotides to about 10,000 nucleotides, about 1,200 nucleotides to about 9,500 nucleotides, about 1,200 nucleotides to about 9,000 nucleotides, about 1,200 nucleotides to about 8,500 nucleotides, about 1,200 nucleotides to about 8,000 nucleotides, about 1,200 nucleotides to about 7,800 nucleotides, about 1,200 nucleotides to about 7,600 nucleotides, about 1,200 nucleotides to about 7,400 nucleotides, about 1,200 nucleotides to about 7,200 nucleotides, about 1,200 nucleotides to about 7,000 nucleotides, about 1,200 nucleotides to about 6,800 nucleotides, about 1,200 nucleotides to about 6,600 nucleotides, about 1,200 nucleotides to about 6,400 nucleotides, about 1,200 nucleotides to about 6,200 nucleotides, about 1,200 nucleotides to about 6,000 nucleotides, about 1,200 nucleotides to about 5,800 nucleotides, about 1,200 nucleotides to about 5,600 nucleotides, about 1,200 nucleotides to about 5,400 nucleotides, about 1,200 nucleotides to about 5,000 nucleotides, about 1,200 nucleotides to about 4,800 nucleotides, about 1,200 nucleotides to about 4,600 nucleotides, about 1,200 nucleotides to about 4,400 nucleotides, about 1,200 nucleotides to about 4,200 nucleotides, about 1,200 nucleotides to about 4,000 nucleotides, about 1,200 nucleotides to about 3,800 nucleotides, about 1,200 nucleotides to about 3,600 nucleotides, about 1,200 nucleotides to about 3,400 nucleotides, about 1,200 nucleotides to about 3,200 nucleotides, about 1,200 nucleotides to about 3,000 nucleotides, about 1,200 nucleotides to about 2,800 nucleotides, about 1,200 nucleotides to about 2,600 nucleotides, about 1,200 nucleotides to about 2,400 nucleotides, about 1,200 nucleotides to about 2,200 nucleotides, about 1,200 nucleotides to about 2,000 nucleotides, about 1,200 nucleotides to about 1,800 nucleotides, about 1,200 nucleotides to about 1,600 nucleotides, about 1,200 nucleotides to about 1,400 nucleotides, about 1,400 nucleotides to about 10,000 nucleotides, about 1,400 nucleotides to about 9,500 nucleotides, about 1,400 nucleotides to about 9,000 nucleotides, about 1,400 nucleotides to about 8,500 nucleotides, about 1,400 nucleotides to about 8,000 nucleotides, about 1,400 nucleotides to about 7,800 nucleotides, about 1,400 nucleotides to about 7,600 nucleotides, about 1,400 nucleotides to about 7,400 nucleotides, about 1,400 nucleotides to about 7,200 nucleotides, about 1,400 nucleotides to about 7,000 nucleotides, about 1,400 nucleotides to about 6,800 nucleotides, about 1,400 nucleotides to about 6,600 nucleotides, about 1,400 nucleotides to about 6,400 nucleotides, about 1,400 nucleotides to about 6,200 nucleotides, about 1,400 nucleotides to about 6,000 nucleotides, about 1,400 nucleotides to about 5,800 nucleotides, about 1,400 nucleotides to about 5,600 nucleotides, about 1,400 nucleotides to about 5,400 nucleotides, about 1,400 nucleotides to about 5,200 nucleotides, about 1,400 nucleotides to about 5,000 nucleotides, about 1,400 nucleotides to about 4,800 nucleotides, about 1,400 nucleotides to about 4,600 nucleotides, about 1,400 nucleotides to about 4,400 nucleotides, about 1,400 nucleotides to about 4,200 nucleotides, about 1,400 nucleotides to about 4,000 nucleotides, about 1,400 nucleotides to about 3,800 nucleotides, about 1,400 nucleotides to about 3,600 nucleotides, about 1,400 nucleotides to about 3,400 nucleotides, about 1,400 nucleotides to about 3,200 nucleotides, about 1,400 nucleotides to about 3,000 nucleotides, about 1,400 nucleotides to about 2,600 nucleotides, about 1,400 nucleotides to about 2,400 nucleotides, about 1,400 nucleotides to about 2,200 nucleotides, about 1,400 nucleotides to about 2,000 nucleotides, about 1,400 nucleotides to about 1,800 nucleotides, about 1,400 nucleotides to about 1,600 nucleotides, about 1,600 nucleotides to about 10,000 nucleotides, about 1,600 nucleotides to about 9,500 nucleotides, about 1,600 nucleotides to about 9,000 nucleotides, about 1,600 nucleotides to about 8,500 nucleotides, about 1,600 nucleotides to about 8,000 nucleotides, about 1,600 nucleotides to about 7,800 nucleotides, about 1,600 nucleotides to about 7,600 nucleotides, about 1,600 nucleotides to about 7,400 nucleotides, about 1,600 nucleotides to about 7,200 nucleotides, about 1,600 nucleotides to about 7,000 nucleotides, about 1,600 nucleotides to about 6,800 nucleotides, about 1,600 nucleotides to about 6,400 nucleotides, about 1,600 nucleotides to about 6,200 nucleotides, about 1,600 nucleotides to about 6,000 nucleotides, about 1,600 nucleotides to about 5,800 nucleotides, about 1,600 nucleotides to about 5,600 nucleotides, about 1,600 nucleotides to about 5,400 nucleotides, about 1,600 nucleotides to about 5,200 nucleotides, about 1,600 nucleotides to about 5,000 nucleotides, about 1,600 nucleotides to about 4,800 nucleotides, about 1,600 nucleotides to about 4,600 nucleotides, about 1,600 nucleotides to about 4,400 nucleotides, about 1,600 nucleotides to about 4,200 nucleotides, about 1,600 nucleotides to about 4,000 nucleotides, about 1,600 nucleotides to about 3,800 nucleotides, about 1,600 nucleotides to about 3,600 nucleotides, about 1,600 nucleotides to about 3,400 nucleotides, about 1,600 nucleotides to about 3,200 nucleotides, about 1,600 nucleotides to about 3,000 nucleotides, about 1,600 nucleotides to about 2,800 nucleotides, about 1,600 nucleotides to about 2,600 nucleotides, about 1,600 nucleotides to about 2,400 nucleotides, about 1,600 nucleotides to about 2,200 nucleotides, about 1,600 nucleotides to about 2,000 nucleotides, about 1,600 nucleotides to about 1,800 nucleotides, about 1,800 nucleotides to about 10,000 nucleotides, about 1,800 nucleotides to about 9,500 nucleotides, about 1,800 nucleotides to about 9,000 nucleotides, about 1,800 nucleotides to about 8,500 nucleotides, about 1,800 nucleotides to about 8,000 nucleotides, about 1,800 nucleotides to about 7,800 nucleotides, about 1,800 nucleotides to about 7,600 nucleotides, about 1,800 nucleotides to about 7,400 nucleotides, about 1,800 nucleotides to about 7,200 nucleotides, about 1,800 nucleotides to about 7,000 nucleotides, about 1,800 nucleotides to about 6,800 nucleotides, about 1,800 nucleotides to about 6,600 nucleotides, about 1,800 nucleotides to about 6,400 nucleotides, about 1,800 nucleotides to about 6,200 nucleotides, about 1,800 nucleotides to about 6,000 nucleotides, about 1,800 nucleotides to about 5,800 nucleotides, about 1,800 nucleotides to about 5,600 nucleotides, about 1,800 nucleotides to about 5,400 nucleotides, about 1,800 nucleotides to about 5,200 nucleotides, about 1,800 nucleotides to about 5,000 nucleotides, about 1,800 nucleotides to about 4,800 nucleotides, about 1,800 nucleotides to about 4,600 nucleotides, about 1,800 nucleotides to about 4,400 nucleotides, about 1,800 nucleotides to about 4,200 nucleotides, about 1,800 nucleotides to about 4,000 nucleotides, about 1,800 nucleotides to about 3,800 nucleotides, about 1,800 nucleotides to about 3,600 nucleotides, about 1,800 nucleotides to about 3,400 nucleotides, about 1,800 nucleotides to about 3,200 nucleotides, about 1,800 nucleotides to about 3,000 nucleotides, about 1,800 nucleotides to about 2,800 nucleotides, about 1,800 nucleotides to about 2,600 nucleotides, about 1,800 nucleotides to about 2,400 nucleotides, about 1,800 nucleotides to about 2,200 nucleotides, about 1,800 nucleotides to about 2,000 nucleotides, about 2,000 nucleotides to about 10,000 nucleotides, about 2,000 nucleotides to about 9,500 nucleotides, about 2,000 nucleotides to about 9,000 nucleotides, about 2,000 nucleotides to about 8,500 nucleotides, about 2,000 nucleotides to about 8,000 nucleotides, about 2,000 nucleotides to about 7,800 nucleotides, about 2,000 nucleotides to about 7,600 nucleotides, about 2,000 nucleotides to about 7,400 nucleotides, about 2,000 nucleotides to about 7,200 nucleotides, about 2,000 nucleotides to about 7,000 nucleotides, about 2,000 nucleotides to about 6,800 nucleotides, about 2,000 nucleotides to about 6,600 nucleotides, about 2,000 nucleotides to about 6,400 nucleotides, about 2,000 nucleotides to about 6,200 nucleotides, about 2,000 nucleotides to about 6,000 nucleotides, about 2,000 nucleotides to about 5,800 nucleotides, about 2,000 nucleotides to about 5,600 nucleotides, about 2,000 nucleotides to about 5,400 nucleotides, about 2,000 nucleotides to about 5,200 nucleotides, about 2,000 nucleotides to about 5,000 nucleotides, about 2,000 nucleotides to about 4,800 nucleotides, about 2,000 nucleotides to about 4,600 nucleotides, about 2,000 nucleotides to about 4,400 nucleotides, about 2,000 nucleotides to about 4,200 nucleotides, about 2,000 nucleotides to about 4,000 nucleotides, about 2,000 nucleotides to about 3,800 nucleotides, about 2,000 nucleotides to about 3,600 nucleotides, about 2,000 nucleotides to about 3,400 nucleotides, about 2,000 nucleotides to about 3,200 nucleotides, about 2,000 nucleotides to about 3,000 nucleotides, about 2,000 nucleotides to about 2,800 nucleotides, about 2,000 nucleotides to about 2,600 nucleotides, about 2,000 nucleotides to about 2,400 nucleotides, about 2,000 nucleotides to about 2,200 nucleotides, about 2,200 nucleotides to about 10,000 nucleotides, about 9,500 nucleotides, about 9,000 nucleotides, about 8,500 nucleotides, about 8,000 nucleotides, about 7,800 nucleotides, about 7,600 nucleotides, about 7,400 nucleotides, about 7,200 nucleotides, about 7,000 nucleotides, about 6,800 nucleotides, about 6,600 nucleotides, about 6,400 nucleotides, about 6,200 nucleotides, about 6,000 nucleotides, about 5,800 nucleotides, about 5,600 nucleotides, about 5,400 nucleotides, about 5,200 nucleotides, about 5,000 nucleotides, about 4,800 nucleotides, about 4,600 nucleotides, about 4,400 nucleotides, about 4,200 nucleotides, about 4,000 nucleotides, about 3,800 nucleotides, about 3,600 nucleotides, about 3,400 nucleotides, about 3,200 nucleotides, about 3,000 nucleotides, about 2,800 nucleotides, about 2,600 nucleotides, about 2,400 nucleotides, about 2,400 nucleotides to about 10,000 nucleotides, about 2,400 nucleotides to about 9,500 nucleotides, about 2,400 nucleotides to about 9,000 nucleotides, about 2,400 nucleotides to about 8,500 nucleotides, about 2,400 nucleotides to about 8,000 nucleotides, about 2,400 nucleotides to about 7,800 nucleotides, about 2,400 nucleotides to about 7,600 nucleotides, about 2,400 nucleotides to about 7,400 nucleotides, about 2,400 nucleotides to about 7,200 nucleotides, about 2,400 nucleotides to about 7,000 nucleotides, about 2,400 nucleotides to about 6,800 nucleotides, about 2,400 nucleotides to about 6,600 nucleotides, about 2,400 nucleotides to about 6,400 nucleotides, about 2,400 nucleotides to about 6,200 nucleotides, about 2,400 nucleotides to about 6,000 nucleotides, about 2,400 nucleotides to about 5,800 nucleotides, about 2,400 nucleotides to about 5,600 nucleotides, about 2,400 nucleotides to about 5,400 nucleotides, about 2,400 nucleotides to about 5,200 nucleotides, about 2,400 nucleotides to about 5,000 nucleotides, about 2,400 nucleotides to about 4,800 nucleotides, about 2,400 nucleotides to about 4,600 nucleotides, about 2,400 nucleotides to about 4,400 nucleotides, about 2,400 nucleotides to about 4,200 nucleotides, about 2,400 nucleotides to about 4,000 nucleotides, about 2,400 nucleotides to about 3,800 nucleotides, about 2,400 nucleotides to about 3,600 nucleotides, about 2,400 nucleotides to about 3,400 nucleotides, about 2,400 nucleotides to about 3,200 nucleotides, about 2,400 nucleotides to about 3,000 nucleotides, about 2,400 nucleotides to about 2,800 nucleotides, about 2,400 nucleotides to about 2,600 nucleotides, about 2,600 nucleotides to about 10,000 nucleotides, about 2,600 nucleotides to about 9,500 nucleotides, about 2,600 nucleotides to about 9,000 nucleotides, about 2,600 nucleotides to about 8,500 nucleotides, about 2,600 nucleotides to about 8,000 nucleotides, about 2,600 nucleotides to about 7,800 nucleotides, about 2,600 nucleotides to about 7,600 nucleotides, about 2,600 nucleotides to about 7,400 nucleotides, about 2,600 nucleotides to about 7,200 nucleotides, about 2,600 nucleotides to about 7,000 nucleotides, about 2,600 nucleotides to about 6,800 nucleotides, about 2,600 nucleotides to about 6,600 nucleotides, about 2,600 nucleotides to about 6,400 nucleotides, about 2,600 nucleotides to about 6,200 nucleotides, about 2,600 nucleotides to about 6,000 nucleotides, about 2,600 nucleotides to about 5,800 nucleotides, about 2,600 nucleotides to about 5,600 nucleotides, about 2,600 nucleotides to about 5,400 nucleotides, about 2,600 nucleotides to about 5,200 nucleotides, about 2,600 nucleotides to about 5,000 nucleotides, about 2,600 nucleotides to about 4,800 nucleotides, about 2,600 nucleotides to about 4,600 nucleotides, about 2,600 nucleotides to about 4,400 nucleotides, about 2,600 nucleotides to about 4,200 nucleotides, about 2,600 nucleotides to about 4,000 nucleotides, about 2,600 nucleotides to about 3,800 nucleotides, about 2,600 nucleotides to about 3,600 nucleotides, about 2,600 nucleotides to about 3,400 nucleotides, about 2,600 nucleotides to about 3,200 nucleotides, about 2,600 nucleotides to about 3,000 nucleotides, about 2,600 nucleotides to about 2,800 nucleotides, about 2,800 nucleotides to about 10,000 nucleotides, about 2,800 nucleotides to about 9,500 nucleotides, about 2,800 nucleotides to about 9,000 nucleotides, about 2,800 nucleotides to about 8,500 nucleotides, about 2,800 nucleotides to about 8,000 nucleotides, about 2,800 nucleotides to about 7,800 nucleotides, about 2,800 nucleotides to about 7,600 nucleotides, about 2,800 nucleotides to about 7,400 nucleotides, about 2,800 nucleotides to about 7,200 nucleotides, about 2,800 nucleotides to about 7,000 nucleotides, about 2,800 nucleotides to about 6,800 nucleotides, about 2,800 nucleotides to about 6,600 nucleotides, about 2,800 nucleotides to about 6,400 nucleotides, about 2,800 nucleotides to about 6,200 nucleotides, about 2,800 nucleotides to about 6,000 nucleotides, about 2,800 nucleotides to about 5,800 nucleotides, about 2,800 nucleotides to about 5,600 nucleotides, about 2,800 nucleotides to about 5,400 nucleotides, about 2,800 nucleotides to about 5,200 nucleotides, about 2,800 nucleotides to about 5,000 nucleotides, about 2,800 nucleotides to about 4,800 nucleotides, about 2,800 nucleotides to about 4,600 nucleotides, about 2,800 nucleotides to about 4,400 nucleotides, about 2,800 nucleotides to about 4,200 nucleotides, about 2,800 nucleotides to about 4,000 nucleotides, about 2,800 nucleotides to about 3,800 nucleotides, about 2,800 nucleotides to about 3,600 nucleotides, about 2,800 nucleotides to about 3,400 nucleotides, about 2,800 nucleotides to about 3,200 nucleotides, about 2,800 nucleotides to about 3,000 nucleotides, about 3,000 nucleotides to about 10,000 nucleotides, about 3,000 nucleotides to about 9,500 nucleotides, about 3,000 nucleotides to about 9,000 nucleotides, about 3,000 nucleotides to about 8,500 nucleotides, about 3,000 nucleotides to about 8,000 nucleotides, about 3,000 nucleotides to about 7,800 nucleotides, about 3,000 nucleotides to about 7,600 nucleotides, about 3,000 nucleotides to about 7,400 nucleotides, about 3,000 nucleotides to about 7,200 nucleotides, about 3,000 nucleotides to about 7,000 nucleotides, about 3,000 nucleotides to about 6,800 nucleotides, about 3,000 nucleotides to about 6,600 nucleotides, about 3,000 nucleotides to about 6,400 nucleotides, about 3,000 nucleotides to about 6,200 nucleotides, about 3,000 nucleotides to about 6,000 nucleotides, about 3,000 nucleotides to about 5,800 nucleotides, about 3,000 nucleotides to about 5,600 nucleotides, about 3,000 nucleotides to about 5,400 nucleotides, about 3,000 nucleotides to about 5,200 nucleotides, about 3,000 nucleotides to about 5,000 nucleotides, about 3,000 nucleotides to about 4,800 nucleotides, about 3,000 nucleotides to about 4,600 nucleotides, about 3,000 nucleotides to about 4,400 nucleotides, about 3,000 nucleotides to about 4,200 nucleotides, about 3,000 nucleotides to about 4,000 nucleotides, about 3,000 nucleotides to about 3,800 nucleotides, about 3,000 nucleotides to about 3,600 nucleotides, about 3,000 nucleotides to about 3,400 nucleotides, about 3,000 nucleotides to about 3,200 nucleotides, about 3,200 nucleotides to about 10,000 nucleotides, about 3,200 nucleotides to about 9,500 nucleotides, about 3,200 nucleotides to about 9,000 nucleotides, about 3,200 nucleotides to about 8,500 nucleotides, about 3,200 nucleotides to about 8,000 nucleotides, about 3,200 nucleotides to about 7,800 nucleotides, about 3,200 nucleotides to about 7,600 nucleotides, about 3,200 nucleotides to about 7,400 nucleotides, about 3,200 nucleotides to about 7,200 nucleotides, about 3,200 nucleotides to about 7,000 nucleotides, about 3,200 nucleotides to about 6,800 nucleotides, about 3,200 nucleotides to about 6,600 nucleotides, about 3,200 nucleotides to about 6,400 nucleotides, about 3,200 nucleotides to about 6,200 nucleotides, about 3,200 nucleotides to about 6,000 nucleotides, about 3,200 nucleotides to about 5,800 nucleotides, about 3,200 nucleotides to about 5,600 nucleotides, about 3,200 nucleotides to about 5,400 nucleotides, about 3,200 nucleotides to about 5,200 nucleotides, about 3,200 nucleotides to about 5,000 nucleotides, about 3,200 nucleotides to about 4,800 nucleotides, about 3,200 nucleotides to about 4,600 nucleotides, about 3,200 nucleotides to about 4,400 nucleotides, about 3,200 nucleotides to about 4,200 nucleotides, about 3,200 nucleotides to about 4,000 nucleotides, about 3,200 nucleotides to about 3,800 nucleotides, about 3,200 nucleotides to about 3,600 nucleotides, about 3,200 nucleotides to about 3,400 nucleotides, about 3,400 nucleotides to about 10,000 nucleotides, about 3,400 nucleotides to about 9,500 nucleotides, about 3,400 nucleotides to about 9,000 nucleotides, about 3,400 nucleotides to about 8,500 nucleotides, about 3,400 nucleotides to about 8,000 nucleotides, about 3,400 nucleotides to about 7,800 nucleotides, about 3,400 nucleotides to about 7,600 nucleotides, about 3,400 nucleotides to about 7,400 nucleotides, about 3,400 nucleotides to about 7,200 nucleotides, about 3,400 nucleotides to about 7,000 nucleotides, about 3,400 nucleotides to about 6,800 nucleotides, about 3,400 nucleotides to about 6,600 nucleotides, about 3,400 nucleotides to about 6,400 nucleotides, about 3,400 nucleotides to about 6,200 nucleotides, about 3,400 nucleotides to about 6,000 nucleotides, about 3,400 nucleotides to about 5,800 nucleotides, about 3,400 nucleotides to about 5,600 nucleotides, about 3,400 nucleotides to about 5,400 nucleotides, about 3,400 nucleotides to about 5,200 nucleotides, about 3,400 nucleotides to about 5,000 nucleotides, about 3,400 nucleotides to about 4,800 nucleotides, about 3,400 nucleotides to about 4,600 nucleotides, about 3,400 nucleotides to about 4,400 nucleotides, about 3,400 nucleotides to about 4,200 nucleotides, about 3,400 nucleotides to about 4,000 nucleotides, about 3,400 nucleotides to about 3,800 nucleotides, about 3,400 nucleotides to about 3,600 nucleotides, about 3,600 nucleotides to about 10,000 nucleotides, about 3,600 nucleotides to about 9,500 nucleotides, about 3,600 nucleotides to about 9,000 nucleotides, about 3,600 nucleotides to about 8,500 nucleotides, about 3,600 nucleotides to about 8,000 nucleotides, about 3,600 nucleotides to about 7,800 nucleotides, about 3,600 nucleotides to about 7,600 nucleotides, about 3,600 nucleotides to about 7,400 nucleotides, about 3,600 nucleotides to about 7,200 nucleotides, about 3,600 nucleotides to about 7,000 nucleotides, about 3,600 nucleotides to about 6,800 nucleotides, about 3,600 nucleotides to about 6,600 nucleotides, about 3,600 nucleotides to about 6,400 nucleotides, about 3,600 nucleotides to about 6,200 nucleotides, about 3,600 nucleotides to about 6,000 nucleotides, about 3,600 nucleotides to about 5,800 nucleotides, about 3,600 nucleotides to about 5,600 nucleotides, about 3,600 nucleotides to about 5,400 nucleotides, about 3,600 nucleotides to about 5,200 nucleotides, about 3,600 nucleotides to about 5,000 nucleotides, about 3,600 nucleotides to about 4,800 nucleotides, about 3,600 nucleotides to about 4,600 nucleotides, about 3,600 nucleotides to about 4,400 nucleotides, about 3,600 nucleotides to about 4,200 nucleotides, about 3,600 nucleotides to about 4,000 nucleotides, about 3,600 nucleotides to about 3,800 nucleotides, about 3,800 nucleotides to about 10,000 nucleotides, about 3,800 nucleotides to about 9,500 nucleotides, about 3,800 nucleotides to about 9,000 nucleotides, about 3,800 nucleotides to about 8,500 nucleotides, about 3,800 nucleotides to about 8,000 nucleotides, about 3,800 nucleotides to about 7,800 nucleotides, about 3,800 nucleotides to about 7,600 nucleotides, about 3,800 nucleotides to about 7,400 nucleotides, about 3,800 nucleotides to about 7,200 nucleotides, about 3,800 nucleotides to about 7,000 nucleotides, about 3,800 nucleotides to about 6,800 nucleotides, about 3,800 nucleotides to about 6,600 nucleotides, about 3,800 nucleotides to about 6,400 nucleotides, about 3,800 nucleotides to about 6,200 nucleotides, about 3,800 nucleotides to about 6,000 nucleotides, about 3,800 nucleotides to about 5,800 nucleotides, about 3,800 nucleotides to about 5,600 nucleotides, about 3,800 nucleotides to about 5,400 nucleotides, about 3,800 nucleotides to about 5,200 nucleotides, about 3,800 nucleotides to about 5,000 nucleotides, about 3,800 nucleotides to about 4,800 nucleotides, about 3,800 nucleotides to about 4,600 nucleotides, about 3,800 nucleotides to about 4,200 nucleotides, about 3,800 nucleotides to about 4,000 nucleotides, about 4,000 nucleotides to about 10,000 nucleotides, about 4,000 nucleotides to about 9,500 nucleotides, about 4,000 nucleotides to about 9,000 nucleotides, about 4,000 nucleotides to about 8,500 nucleotides, about 4,000 nucleotides to about 8,000 nucleotides, about 4,000 nucleotides to about 7,800 nucleotides, about 4,000 nucleotides to about 7,600 nucleotides, about 4,000 nucleotides to about 7,400 nucleotides, about 4,000 nucleotides to about 7,200 nucleotides, about 4,000 nucleotides to about 7,000 nucleotides, about 4,000 nucleotides to about 6,800 nucleotides, about 4,000 nucleotides to about 6,600 nucleotides, about 4,000 nucleotides to about 6,400 nucleotides, about 4,000 nucleotides to about 6,200 nucleotides, about 4,000 nucleotides to about 6,000 nucleotides, about 4,000 nucleotides to about 5,800 nucleotides, about 4,000 nucleotides to about 5,600 nucleotides, about 4,000 nucleotides to about 5,400 nucleotides, about 4,000 nucleotides to about 5,200 nucleotides, about 4,000 nucleotides to about 5,000 nucleotides, about 4,000 nucleotides to about 4,800 nucleotides, about 4,000 nucleotides to about 4,600 nucleotides, about 4,000 nucleotides to about 4,400 nucleotides, about 4,000 nucleotides to about 4,200 nucleotides, about 4,200 nucleotides to about 10,000 nucleotides, about 4,200 nucleotides to about 9,500 nucleotides, about 4,200 nucleotides to about 9,000 nucleotides, about 4,200 nucleotides to about 8,500 nucleotides, about 4,200 nucleotides to about 8,000 nucleotides, about 4,200 nucleotides to about 7,800 nucleotides, about 4,200 nucleotides to about 7,600 nucleotides, about 4,200 nucleotides to about 7,400 nucleotides, about 4,200 nucleotides to about 7,200 nucleotides, about 4,200 nucleotides to about 7,000 nucleotides, about 4,200 nucleotides to about 6,800 nucleotides, about 4,200 nucleotides to about 6,600 nucleotides, about 4,200 nucleotides to about 6,400 nucleotides, about 4,200 nucleotides to about 6,200 nucleotides, about 4,200 nucleotides to about 6,000 nucleotides, about 4,200 nucleotides to about 5,800 nucleotides, about 4,200 nucleotides to about 5,600 nucleotides, about 4,200 nucleotides to about 5,400 nucleotides, about 4,200 nucleotides to about 5,200 nucleotides, about 4,200 nucleotides to about 5,000 nucleotides, about 4,200 nucleotides to about 4,800 nucleotides, about 4,200 nucleotides to about 4,600 nucleotides, about 4,200 nucleotides to about 4,400 nucleotides, about 4,400 nucleotides to about 10,000 nucleotides, about 4,400 nucleotides to about 9,500 nucleotides, about 4,400 nucleotides to about 9,000 nucleotides, about 4,400 nucleotides to about 8,500 nucleotides, about 4,400 nucleotides to about 8,000 nucleotides, about 4,400 nucleotides to about 7,800 nucleotides, about 4,400 nucleotides to about 7,600 nucleotides, about 4,400 nucleotides to about 7,400 nucleotides, about 4,400 nucleotides to about 7,200 nucleotides, about 4,400 nucleotides to about 7,000 nucleotides, about 4,400 nucleotides to about 6,800 nucleotides, about 4,400 nucleotides to about 6,600 nucleotides, about 4,400 nucleotides to about 6,400 nucleotides, about 4,400 nucleotides to about 6,200 nucleotides, about 4,400 nucleotides to about 6,000 nucleotides, about 4,400 nucleotides to about 5,800 nucleotides, about 4,400 nucleotides to about 5,600 nucleotides, about 4,400 nucleotides to about 5,400 nucleotides, about 4,400 nucleotides to about 5,200 nucleotides, about 4,400 nucleotides to about 5,000 nucleotides, about 4,400 nucleotides to about 4,800 nucleotides, about 4,400 nucleotides to about 4,600 nucleotides, about 4,600 nucleotides to about 10,000 nucleotides, about 4,600 nucleotides to about 9,500 nucleotides, about 4,600 nucleotides to about 9,000 nucleotides, about 4,600 nucleotides to about 8,500 nucleotides, about 4,600 nucleotides to about 8,000 nucleotides, about 4,600 nucleotides to about 7,800 nucleotides, about 4,600 nucleotides to about 7,600 nucleotides, about 4,600 nucleotides to about 7,400 nucleotides, about 4,600 nucleotides to about 7,200 nucleotides, about 4,600 nucleotides to about 7,000 nucleotides, about 4,600 nucleotides to about 6,800 nucleotides, about 4,600 nucleotides to about 6,600 nucleotides, about 4,600 nucleotides to about 6,400 nucleotides, about 4,600 nucleotides to about 6,200 nucleotides, about 4,600 nucleotides to about 6,000 nucleotides, about 4,600 nucleotides to about 5,800 nucleotides, about 4,600 nucleotides to about 5,600 nucleotides, about 4,600 nucleotides to about 5,400 nucleotides, about 4,600 nucleotides to about 5,200 nucleotides, about 4,600 nucleotides to about 5,000 nucleotides, about 4,600 nucleotides to about 4,800 nucleotides, about 4,800 nucleotides to about 10,000 nucleotides, about 4,800 nucleotides to about 9,500 nucleotides, about 4,800 nucleotides to about 9,000 nucleotides, about 4,800 nucleotides to about 8,500 nucleotides, about 4,800 nucleotides to about 8,000 nucleotides, about 4,800 nucleotides to about 7,800 nucleotides, about 4,800 nucleotides to about 7,600 nucleotides, about 4,800 nucleotides to about 7,400 nucleotides, about 4,800 nucleotides to about 7,200 nucleotides, about 4,800 nucleotides to about 7,000 nucleotides, about 4,800 nucleotides to about 6,800 nucleotides, about 4,800 nucleotides to about 6,600 nucleotides, about 4,800 nucleotides to about 6,400 nucleotides, about 4,800 nucleotides to about 6,200 nucleotides, about 4,800 nucleotides to about 6,000 nucleotides, about 4,800 nucleotides to about 5,800 nucleotides, about 4,800 nucleotides to about 5,600 nucleotides, about 4,800 nucleotides to about 5,400 nucleotides, about 4,800 nucleotides to about 5,200 nucleotides, about 4,800 nucleotides to about 5,000 nucleotides, about 5,000 nucleotides to about 10,000 nucleotides, about 5,000 nucleotides to about 9,500 nucleotides, about 5,000 nucleotides to about 9,000 nucleotides, about 5,000 nucleotides to about 8,500 nucleotides, about 5,000 nucleotides to about 8,000 nucleotides, about 5,000 nucleotides to about 7,800 nucleotides, about 5,000 nucleotides to about 7,600 nucleotides, about 5,000 nucleotides to about 7,400 nucleotides, about 5,000 nucleotides to about 7,200 nucleotides, about 5,000 nucleotides to about 7,000 nucleotides, about 5,000 nucleotides to about 6,800 nucleotides, about 5,000 nucleotides to about 6,600 nucleotides, about 5,000 nucleotides to about 6,400 nucleotides, about 5,000 nucleotides to about 6,200 nucleotides, about 5,000 nucleotides to about 6,000 nucleotides, about 5,000 nucleotides to about 5,800 nucleotides, about 5,000 nucleotides to about 5,600 nucleotides, about 5,000 nucleotides to about 5,400 nucleotides, about 5,000 nucleotides to about 5,200 nucleotides, about 5,200 nucleotides to about 10,000 nucleotides, about 5,200 nucleotides to about 9,500 nucleotides, about 5,200 nucleotides to about 9,000 nucleotides, about 5,200 nucleotides to about 8,500 nucleotides, about 5,200 nucleotides to about 8,000 nucleotides, about 5,200 nucleotides to about 7,800 nucleotides, about 5,200 nucleotides to about 7,600 nucleotides, about 5,200 nucleotides to about 7,400 nucleotides, about 5,200 nucleotides to about 7,200 nucleotides, about 5,200 nucleotides to about 7,000 nucleotides, about 5,200 nucleotides to about 6,800 nucleotides, about 5,200 nucleotides to about 6,600 nucleotides, about 5,200 nucleotides to about 6,400 nucleotides, about 5,200 nucleotides to about 6,200 nucleotides, about 5,200 nucleotides to about 6,000 nucleotides, about 5,200 nucleotides to about 5,800 nucleotides, about 5,200 nucleotides to about 5,600 nucleotides, about 5,200 nucleotides to about 5,400 nucleotides, about 5,400 nucleotides to about 10,000 nucleotides, about 5,400 nucleotides to about 9,500 nucleotides, about 5,400 nucleotides to about 9,000 nucleotides, about 5,400 nucleotides to about 8,500 nucleotides, about 5,400 nucleotides to about 8,000 nucleotides, about 5,400 nucleotides to about 7,800 nucleotides, about 5,400 nucleotides to about 7,600 nucleotides, about 5,400 nucleotides to about 7,400 nucleotides, about 5,400 nucleotides to about 7,200 nucleotides, about 5,400 nucleotides to about 7,000 nucleotides, about 5,400 nucleotides to about 6,800 nucleotides, about 5,400 nucleotides to about 6,600 nucleotides, about 5,400 nucleotides to about 6,400 nucleotides, about 5,400 nucleotides to about 6,200 nucleotides, about 5,400 nucleotides to about 6,000 nucleotides, about 5,400 nucleotides to about 5,800 nucleotides, about 5,400 nucleotides to about 5,600 nucleotides, about 5,600 nucleotides to about 10,000 nucleotides, about 5,600 nucleotides to about 9,500 nucleotides, about 5,600 nucleotides to about 9,000 nucleotides, about 5,600 nucleotides to about 8,500 nucleotides, about 5,600 nucleotides to about 8,000 nucleotides, about 5,600 nucleotides to about 7,800 nucleotides, about 5,600 nucleotides to about 7,600 nucleotides, about 5,600 nucleotides to about 7,400 nucleotides, about 5,600 nucleotides to about 7,200 nucleotides, about 5,600 nucleotides to about 7,000 nucleotides, about 5,600 nucleotides to about 6,800 nucleotides, about 5,600 nucleotides to about 6,600 nucleotides, about 5,600 nucleotides to about 6,400 nucleotides, about 5,600 nucleotides to about 6,200 nucleotides, about 5,600 nucleotides to about 6,000 nucleotides, about 5,600 nucleotides to about 5,800 nucleotides, about 5,800 nucleotides to about 10,000 nucleotides, about 5,800 nucleotides to about 9,500 nucleotides, about 5,800 nucleotides to about 9,000 nucleotides, about 5,800 nucleotides to about 8,500 nucleotides, about 5,800 nucleotides to about 8,000 nucleotides, about 5,800 nucleotides to about 7,800 nucleotides, about 5,800 nucleotides to about 7,600 nucleotides, about 5,800 nucleotides to about 7,400 nucleotides, about 5,800 nucleotides to about 7,200 nucleotides, about 5,800 nucleotides to about 7,000 nucleotides, about 5,800 nucleotides to about 6,800 nucleotides, about 5,800 nucleotides to about 6,600 nucleotides, about 5,800 nucleotides to about 6,400 nucleotides, about 5,800 nucleotides to about 6,200 nucleotides, about 5,800 nucleotides to about 6,000 nucleotides, about 6,000 nucleotides to about 10,000 nucleotides, about 6,000 nucleotides to about 9,500 nucleotides, about 6,000 nucleotides to about 9,000 nucleotides, about 6,000 nucleotides to about 8,500 nucleotides, about 6,000 nucleotides to about 8,000 nucleotides, about 6,000 nucleotides to about 7,800 nucleotides, about 6,000 nucleotides to about 7,600 nucleotides, about 6,000 nucleotides to about 7,400 nucleotides, about 6,000 nucleotides to about 7,200 nucleotides, about 6,000 nucleotides to about 7,000 nucleotides, about 6,000 nucleotides to about 6,800 nucleotides, about 6,000 nucleotides to about 6,600 nucleotides, about 6,000 nucleotides to about 6,400 nucleotides, about 6,000 nucleotides to about 6,200 nucleotides, about 6,200 nucleotides to about 10,000 nucleotides, about 6,200 nucleotides to about 9,000 nucleotides, about 6,200 nucleotides to about 8,500 nucleotides, about 6,200 nucleotides to about 8,000 nucleotides, about 6,200 nucleotides to about 7,800 nucleotides, about 6,200 nucleotides to about 7,600 nucleotides, about 6,200 nucleotides to about 7,400 nucleotides, about 6,200 nucleotides to about 7,200 nucleotides, about 6,200 nucleotides to about 7,000 nucleotides, about 6,200 nucleotides to about 6,800 nucleotides, about 6,200 nucleotides to about 6,600 nucleotides, about 6,200 nucleotides to about 6,400 nucleotides, about 6,400 nucleotides to about 10,000 nucleotides, about 6,400 nucleotides to about 9,500 nucleotides, about 6,400 nucleotides to about 9,000 nucleotides, about 6,400 nucleotides to about 8,500 nucleotides, about 6,400 nucleotides to about 8,000 nucleotides, about 6,400 nucleotides to about 7,800 nucleotides, about 6,400 nucleotides to about 7,600 nucleotides, about 6,400 nucleotides to about 7,400 nucleotides, about 6,400 nucleotides to about 7,200 nucleotides, about 6,400 nucleotides to about 7,000 nucleotides, about 6,400 nucleotides to about 6,800 nucleotides, about 6,400 nucleotides to about 6,600 nucleotides, about 6,600 nucleotides to about 10,000 nucleotides, about 6,600 nucleotides to about 9,500 nucleotides, about 6,600 nucleotides to about 9,000 nucleotides, about 6,600 nucleotides to about 8,500 nucleotides, about 6,600 nucleotides to about 8,000 nucleotides, about 6,600 nucleotides to about 7,800 nucleotides, about 6,600 nucleotides to about 7,600 nucleotides, about 6,600 nucleotides to about 7,400 nucleotides, about 6,600 nucleotides to about 7,200 nucleotides, about 6,600 nucleotides to about 7,000 nucleotides, about 6,600 nucleotides to about 6,800 nucleotides, about 6,800 nucleotides to about 10,000 nucleotides, about 6,800 nucleotides to about 9,500 nucleotides, about 6,800 nucleotides to about 9,000 nucleotides, about 6,800 nucleotides to about 8,500 nucleotides, about 6,800 nucleotides to about 8,000 nucleotides, about 6,800 nucleotides to about 7,800 nucleotides, about 6,800 nucleotides to about 7,600 nucleotides, about 6,800 nucleotides to about 7,400 nucleotides, about 6,800 nucleotides to about 7,200 nucleotides, about 6,800 nucleotides to about 7,000 nucleotides, about 7,000 nucleotides to about 10,000 nucleotides, about 7,000 nucleotides to about 9,500 nucleotides, about 7,000 nucleotides to about 9,000 nucleotides, about 7,000 nucleotides to about 8,500 nucleotides, about 7,000 nucleotides to about 8,000 nucleotides, about 7,000 nucleotides to about 7,800 nucleotides, about 7,000 nucleotides to about 7,600 nucleotides, about 7,000 nucleotides to about 7,400 nucleotides, about 7,000 nucleotides to about 7,200 nucleotides, about 7,200 nucleotides to about 10,000 nucleotides, about 7,200 nucleotides to about 9,500 nucleotides, about 7,200 nucleotides to about 9,000 nucleotides, about 7,200 nucleotides to about 8,500 nucleotides, about 7,200 nucleotides to about 8,000 nucleotides, about 7,200 nucleotides to about 7,800 nucleotides, about 7,200 nucleotides to about 7,600 nucleotides, about 7,200 nucleotides to about 7,400 nucleotides, about 7,400 nucleotides to about 10,000 nucleotides, about 7,400 nucleotides to about 9,500 nucleotides, about 7,400 nucleotides to about 9,000 nucleotides, about 7,400 nucleotides to about 8,500 nucleotides, about 7,400 nucleotides to about 8,000 nucleotides, about 7,400 nucleotides to about 7,800 nucleotides, about 7,400 nucleotides to about 7,600 nucleotides, about 7,600 nucleotides to about 10,000 nucleotides, about 7,600 nucleotides to about 9,500 nucleotides, about 7,600 nucleotides to about 9,000 nucleotides, about 7,600 nucleotides to about 8,500 nucleotides, about 7,600 nucleotides to about 8,000 nucleotides, about 7,600 nucleotides to about 7,800 nucleotides, about 7,800 nucleotides to about 10,000 nucleotides, about 7,800 nucleotides to about 9,500 nucleotides, about 7,800 nucleotides to about 9,000 nucleotides, about 7,800 nucleotides to about 8,500 nucleotides, about 7,800 nucleotides to about 8,000 nucleotides, about 8,000 nucleotides to about 10,000 nucleotides, about 8,000 nucleotides to about 9,500 nucleotides, about 8,000 nucleotides to about 9,000 nucleotides, about 8,000 nucleotides to about 8,500 nucleotides, about 8,500 nucleotides to about 10,000 nucleotides, about 8,500 nucleotides to about 9,500 nucleotides, about 8,500 nucleotides to about 9,000 nucleotides, about 9,000 nucleotides to about 10,000 nucleotides, about 9,000 nucleotides to about 9,500 nucleotides, or about 9,500 nucleotides to about 10,000 nucleotides (inclusive).

[0255] A variety of different methods known in the art can be used to introduce any of vectors disclosed herein into a primate cell (e.g., a supporting cochlear outer hair cell or a hair cell (e.g., an inner hair cell or an outer hair cell). Non-limiting examples of methods for introducing nucleic acid into a primate cell include: lipofection, transfection (e.g., calcium phosphate transfection, transfection using highly branched organic compounds, transfection using cationic polymers, dendrimer-based transfection, optical transfection, particle-based transfection (e.g., nanoparticle transfection), or transfection using liposomes (e.g., cationic liposomes)), microinjection, electroporation, cell squeezing, sonoporation, protoplast fusion, impalefection, hydrodynamic delivery, gene gun, magnetofection, viral transfection, and nucleofection.

[0256] Skilled practitioners will appreciate that any of the vectors described herein can be introduced into a primate cell by, for example, lipofection.

[0257] Various molecular biology techniques that can be used to introduce a mutation(s) and/or a deletion(s) into an endogenous gene are also known in the art. Non-limiting examples of such techniques include site-directed mutagenesis, CRISPR (e.g., CRISPR/Cas9-induced knock-in mutations and CRISPR/Cas9-induced knock-out mutations), TALENs, and base editing (Rees & Lui, Nature Rev. Genetics 19: 770-788, 2018; Eid et al., Biochem J. 475(11): 1955-1964, 2018). These methods can be used to correct the sequence of a defective endogenous gene present in a chromosome of a target cell.

[0258] Any of the vectors described herein can further include a control sequence, e.g., a control sequence selected from the group of a transcription initiation sequence, a transcription termination sequence, a promoter sequence, an enhancer sequence, an RNA splicing sequence, a polyadenylation (polyA) sequence, and a Kozak consensus sequence. Non-limiting examples of these control sequences are described herein. In some embodiments, a promoter can be a native promoter, a constitutive promoter, an inducible promoter, and/or a tissue-specific promoter.

[0259] Some embodiments of any of the compositions and kits described herein can include any combination of the AAV vectors described herein. Some embodiments of any of the methods described herein can include the use of any combination of the AAV vectors described herein.

### Promoters

[0260] The term “promoter” means a DNA sequence recognized by enzymes/proteins in a primate cell required to initiate the transcription of a specific gene (e.g., a supporting cell target gene or a hair cell target gene). A promoter typically refers to, e.g., a nucleotide sequence to which an RNA polymerase and/or any associated factor binds and at which transcription is initiated. Non-limiting examples of promoters are described herein. Additional examples of promoters are known in the art.

[0261] In some embodiments, a vector encoding an N-terminal portion of a hair cell target protein (e.g., a human hair cell target protein) or a hair cell target protein can include a promoter and/or an enhancer. The vector encoding the N-terminal portion of the hair cell target protein or a hair cell target protein can include any of the promoters and/or enhancers described herein or known in the art.

[0262] In some embodiments, a vector encoding an N-terminal portion of a supporting cell target protein (e.g., a human supporting cell target protein) or a supporting cell target protein can include a promoter and/or an enhancer. The vector encoding the N-terminal portion of the supporting cell target protein or a supporting cell target protein can include any of the promoters and/or enhancers described herein or known in the art.

[0263] In some embodiments, the promoter is an inducible promoter, a constitutive promoter, a primate cell promoter, a viral promoter, a chimeric promoter, an engineered promoter, a tissue-specific promoter, or any other type of promoter known in the art. In some embodiments, the promoter is a RNA polymerase II promoter, such as a primate RNA polymerase II promoter. In some embodiments, the promoter is a RNA polymerase III promoter, including, but not limited to, a H1 promoter, a human U6 promoter, a mouse U6 promoter, or a swine U6 promoter. The promoter will generally be one that is able to promote transcription in cochlear cells such as hair cells. In some examples, the promoter is a cochlea-specific promoter or a cochlea-oriented promoter.

[0264] A variety of promoters are known in the art that can be used herein. Non-limiting examples of promoters that can be used herein include: human EF1a, human cytomegalovirus (CMV) (U.S. Pat. No. 5,168,062), human ubiquitin C (UBC), mouse phosphoglycerate kinase 1, polyoma adenovirus, simian virus 40 (SV40), β-globin, β-actin, α-fetoprotein, γ-globin, β-interferon, γ-glutamyl transferase, mouse mammary tumor virus (MMTV), Rous sarcoma virus, rat insulin, glyceraldehyde-3-phosphate dehydrogenase, metallothionein II (MT II), amylase, cathepsin, MI muscarinic receptor, retroviral LTR (e.g. human T-cell leukemia virus HTLV), AAV ITR, interleukin-2, collagenase, platelet-derived growth factor, adenovirus 5 E2, stromelysin, murine MX gene, glucose regulated proteins (GRP78 and GRP94), α-2-macroglobulin, vimentin, MHC class I gene H-2κb, HSP70, proliferin, tumor necrosis factor, thyroid stimulating hormone a gene, immunoglobulin light chain, T-cell receptor, HLA DQα and DQβ, interleukin-2 receptor, MHC class II, MHC class II HLA-DRα, muscle creatine kinase, prealbumin (transthyretin), elastase I, albumin gene, c-fos, c-HA-ras, neural cell adhesion molecule (NCAM), H2B (TH2B) histone, rat growth hormone, human serum amyloid (SAA), troponin I (TN I), duchenne muscular dystrophy, human immunodeficiency virus, and Gibbon Ape Leukemia Virus (GALV) promoters. Additional examples of promoters are known in the art. See, e.g., Lodish, Molecular Cell Biology, Freeman and Company, New York 2007. In some embodiments, the promoter is the CMV immediate early promoter. In some embodiments, the promoter is a CAG promoter or a CAG/CBA promoter.

[0265] The term “constitutive” promoter refers to a nucleotide sequence that, when operably linked with a nucleic acid encoding a target protein (e.g., a supporting cell target protein, a hair cell target protein), causes RNA to be transcribed from the nucleic acid in a primate cell under most or all physiological conditions.

[0266] Examples of constitutive promoters include, without limitation, the retroviral Rous sarcoma virus (RSV) LTR promoter, the cytomegalovirus (CMV) promoter (see, e.g., Boshart et al, Cell 41:521-530, 1985), the SV40 promoter, the dihydrofolate reductase promoter, the beta-actin promoter, the phosphoglycerol kinase (PGK) promoter, and the EF1-alpha promoter (Invitrogen).

[0267] Inducible promoters allow regulation of gene expression and can be regulated by exogenously supplied compounds, environmental factors such as temperature, or the presence of a specific physiological state, e.g., acute phase, a particular differentiation state of the cell, or in replicating cells only. Inducible promoters and inducible systems are available from a variety of commercial sources, including, without limitation, Invitrogen, Clontech, and Ariad. Additional examples of inducible promoters are known in the art.

[0268] Examples of inducible promoters regulated by exogenously supplied compounds include the zinc-inducible sheep metallothionine (MT) promoter, the dexamethasone (Dex)-inducible mouse mammary tumor virus (MMITV) promoter, the T7 polymerase promoter system (WO 98/10088); the ecdysone insect promoter (No et al, Proc. Natl. Acad. Sci. U.S.A. 93:3346-3351, 1996), the tetracycline-repressible system (Gossen et al, Proc. Natl. Acad. Sci. U.S.A. 89:5547-5551, 1992), the tetracycline-inducible system (Gossen et al, Science 268:1766-1769, 1995, see also Harvey et al, Curr. Opin. Chem. Biol. 2:512-518, 1998), the RU486-inducible system (Wang et al, Nat. Biotech. 15:239-243, 1997) and Wang et al, Gene Ther. 4:432-441, 1997), and the rapamycin-inducible system (Magari et al. J. Clin. Invest. 100:2865-2872, 1997).

[0269] The term “tissue-specific” promoter refers to a promoter that is active only in certain specific cell types and/or tissues (e.g., transcription of a specific gene occurs only within cells expressing transcription regulatory proteins that bind to the tissue-specific promoter).

[0270] In some embodiments, the regulatory sequences impart tissue-specific gene expression capabilities. In some cases, the tissue-specific regulatory sequences bind tissue-specific transcription factors that induce transcription in a tissue-specific manner.

[0271] Exemplary tissue-specific promoters include but are not limited to the following: a liver-specific thyroxin binding globulin (TBG) promoter, an insulin promoter, a glucagon promoter, a somatostatin promoter, a pancreatic polypeptide (PPY) promoter, a synapsin-1 (Syn) promoter, a creatine kinase (MCK) promoter, a primate desmin (DES) promoter, an alpha-myosin heavy chain (a-MHC) promoter, and a cardiac Troponin T (cTnT) promoter. Additional exemplary promoters include Beta-actin promoter, hepatitis B virus core promoter (Sandig et al., Gene Ther. 3:1002-1009, 1996), alpha-fetoprotein (AFP) promoter (Arbuthnot et al., Hum. Gene Ther. 7:1503-1514, 1996), bone osteocalcin promoter (Stein et al., Mol. Biol. Rep. 24:185-196, 1997); bone sialoprotein promoter (Chen et al., J. Bone Miner. Res. 11:654-664, 1996), CD2 promoter (Hansal et al., J. Immunol. 161:1063-1068, 1998); immunoglobulin heavy chain promoter; T cell receptor alpha-chain promoter, neuronal such as neuron-specific enolase (NSE) promoter (Andersen et al., Cell. Mol. Neurobiol. 13:503-515, 1993), neurofilament light-chain gene promoter (Piccioli et al., Proc. Natl. Acad. Sci. U.S.A. 88:5611-5615, 1991), and the neuron-specific vgf gene promoter (Piccioli et al., Neuron 15:373-384, 1995).

[0272] In some embodiments, the tissue-specific promoter is a cochlea-specific promoter. In some embodiments, the tissue-specific promoter is a cochlear hair cell-specific promoter. Non-limiting examples of cochlear hair cell-specific promoters include but are not limited to: a ATOH1 promoter, a POU4F3 promoter, a LHX3 promoter, a MYO7A promoter, a MYO6 promoter, a α9ACHR promoter, and a α10ACHR promoter. In some embodiments, the promoter is an outer hair cell-specific promoter such as a PRESTIN promoter or an ONCOMOD promoter. See, e.g., Zheng et al., Nature 405:149-155, 2000; Tian et al. Dev. Dyn. 231:199-203, 2004; and Ryan et al., Adv. Otorhinolaryngol. 66: 99-115, 2009.

[0273] In some embodiments of any of the AAV vectors described herein, the AAV vector includes a human ATOH1 enhancer-promoter (SEQ ID NO: 84).

Human ATOH1 enhancer-promoter
(SEQ ID NO: 84)
ctatggagtttgcataacaaacgtttggcagctcgctctottacactccattaacaagctgtaacatatag
ctgcaggttgctataatctcattaatattttggaaacttgaatattgagtatttctgagtgctcattcccc
atatgccagccacttctgccatgctgactggttcctttctctccattattagcaattagcttcttaccttc
caaagtcagatccaaggtatccaagatactagcaaaggaatcaactatgtgtgcaagttaagcatgcttaa
tatcacccaaacaaacaaagaggcagcatttcttaaagtaatgaagatagataaatcgggttagtcctttg
cgacactgctggtgctttctagagttttatatattttaagcagcttgctttatattctgtctttgcctccc
accccaccagcacttttatttgtggagggttttggctcgccacactttgggaaacttatttgatttcacgg
agagctgaaggaagatcatttttggcaacagacaagtttaaacacgatttctatgggacattgctaactgg
ggcccctaaggagaaaggggaaactgagcggagaatgggttaaatccttggaagcaggggagaggcagggg
aggagagaagtcggaggagtataaagaaaaggacaggaaccaagaagcgtgggggtggtttgccgtaatgt
gagtgtttcttaattagagaacggttgacaatagagggtctggcagaggctcctggccgcggtgcggagcg
tctggagcggagcacgcgctgtcagctggtgagcgcactctcctttcaggcagctccccggggagctgtgc
ggccacatttaacaccatcatcacccctccccggcctcctcaacctcggcctcctcctcgtcgacagcctt
ccttggcccccaccagcagagctcacagtagcgagcgtctctcgccgtctcccgcactcggccggggcctc
tctcctcccccagctgcgcagcgggagccgccactgcccactgcacctcccagcaaccagcccagcacgca
aagaagctgcgcaaagttaaagccaagcaatgccaaggggaggggaagctggaggcgggctttgagtggct
tctgggcgcctggcgggtccagaatcgcccagagccgcccgcggtcgtgcacatctgacccgagtcagctt
gggcaccagccgagagccggctccgcaccgctcccgcaccccagccgccggggtggtgacacacaccggag
tcgaattacagccctgcaattaacatatgaatctgacgaatttaaaagaaggaaaaaaaaaaaaaaacctg
agcaggcttgggagtcctctgcacacaagaacttttctcggggtgtaaaaactctttgattggctgctcgc
acgcgcctgcccgcgccctccattggctgagaagacacgcgaccggcgcgaggagggggttgggagaggag
cggggggagactgagtggcgcgtgccgctttttaaaggggcgcagcgccttcagcaaccggagaagcatag
ttgcacgcgacctggtgtgtgatctccgagtgggtgggggagggtcgaggagggaaaaaaaaataagacgt
tgcagaagagacccggaaagggccttttttttggttgagctggtgtcccagtgctgcctccgatcctgagc
ctccgagcctttgcagtgcaa

### Enhancers and 5′ Cap

[0274] In some instances, a vector can include a promoter sequence and/or an enhancer sequence. The term “enhancer” refers to a nucleotide sequence that can increase the level of transcription of a nucleic acid encoding a protein of interest (e.g., a supporting cell target protein or a hair cell target protein). Enhancer sequences (50-1500 basepairs in length) generally increase the level of transcription by providing additional binding sites for transcription-associated proteins (e.g., transcription factors). In some embodiments, an enhancer sequence is found within an intronic sequence. Unlike promoter sequences, enhancer sequences can act at much larger distance away from the transcription start site (e.g., as compared to a promoter). Non-limiting examples of enhancers include a RSV enhancer, a CMV enhancer, and a SV40 enhancer.

### Destabilizing Domain (DD)

[0275] Any of the AAV vectors provided herein can optionally include a sequence encoding a destabilizing domain (“a destabilizing sequence”) for temporal control of protein expression. Non-limiting examples of destabilizing sequences include sequences encoding: a FK506 sequence, a dihydrofolate reductase (DHFR) sequence.

Exemplary DHFR destabilizing sequence
(SEQ ID NO: 85):
MISLIAALAVDYVIGMENAMPWNLPADLAWFKRNTLNKPVIMGRHTWESIGRPLPGRKNIILSSQPSTDDR
VTWVKSVDEAIAACGDVPEIMVIGGGRVIEQFLPKAQKLYLTHIDAEVEGDTHFPDYEPDDWESVESEFHD
ADAQNSHSYCFEILERR
Exemplary DHFR destabilizing domain sequence
(SEQ ID NO: 86)
ggtaccatcagtotgattqcggcgttagoggtagattacgttatoggcatggaaaacgccatgccgtggaa
cctqcctqccgatctcgcctggtttaaacgcaacaccttaaataaacccgtgattatgggccgccatacct
gggaatcaatoggtcgtccgttgccaggacgcaaaaatattatcctcagcagtcaaccgagtacggacgat
cgcgtaacgtgggtgaagtoggtggatgaagccatcgcggcgtgtggtgacgtaccagaaatcatggtgat
tggcggcggtcgcgttattgaacagttottgccaaaagcgcaaaaactqtatctgacgcatatcgacgcag
aagtggaaggcgacacccatttccoggattacgagccggatgactgggaatcggtattcagcgaattccac
gatqctgatqcgcagaactotcacagctattgotttgagattctggagoggcgataa

[0276] In some embodiments of any of the AAV vectors described herein, the AAV vector includes a destabilizing domain (SEQ ID NO: 87).

Exemplary destabilizing domain
(SEQ ID NO: 87)
atcagtctgattgoggcgttagcggtagattacgttatcggcatggaaaacgccatgccgtggaacctgcc
tgccgatctcgcctggtttaaacgcaacaccttaaataaacccgtgattatgggccgccatacctgggaat
caatcggtcgtccgttgccaggacgcaaaaatattatcctcagcagtcaaccgagtacggacgatcgcgta
acgtgggtgaagtcggtggatgaagccatcgcggcgtgtggtgacgtaccagaaatcatggtgattggcgg
cggtcgcgttattgaacagttcttgccaaaagcgcaaaaactgtatctgacgcatatcgacgcagaagtgg
aaggcgacacccatttcccggattacgagccggatgactgggaatcggtattcagcgaattccacgatgct
gatgcgcagaactctcacagctattgctttgagattctggagcggcga

[0277] Additional examples of destabilizing sequences are known in the art. In some embodiments, the destabilizing sequence is a FK506- and rapamycin-binding protein (FKBP12) sequence, and the stabilizing ligand is Shield-1 (Shld1) (Banaszynski et al. (2012) Cell 126(5): 995-1004).

Exemplary FKBP12 destabilizing sequence
(SEQ ID NO: 88)
MGVEKQVIRPGNGPKPAPGQTVTVHCTGEGKDGDLSQKFWSTKDEGQKPFSFQIGKGAVIKGWDEGVIGMQ
IGEVARLRCSSDYAYGAGGFPAWGIQPNSVLDFEIEVLSVQ

[0278] In some embodiments, the destabilizing sequence is a DHFR sequence, and the stabilizing ligand is trimethoprim (IMP) (Iwamoto et al. (2010) Chem Biol 17:981-988).

[0279] In the absence of a stabilizing ligand, the protein sequence operatively linked to the destabilizing sequence is degraded by ubiquitination. In contrast, in the presence of a stabilizing ligand, protein degradation is inhibited, thereby allowing the protein sequence operatively linked to the destabilizing sequence to be actively expressed. As a positive control for stabilization of protein expression, protein expression can be detected by conventional means, including enzymatic, radiographic, colorimetric, fluorescence, or other spectrographic assays; fluorescent activating cell sorting (FACS) assays; immunological assays (e.g., enzyme linked immunosorbent assay (ELISA), radioimmunoassay (RIA), and immunohistochemistry).

[0280] In some embodiments, the destabilizing sequence is a FKBP12 sequence, and the presence of an AAV vector carrying the FKBP12 gene in a primate cell (e.g., a supporting cochlear outer hair cell) is detected by western blotting. In some embodiments, the destabilizing sequence can be used to verify the temporally-specific activity of any of the AAV vectors described herein.

### Poly(A) Sequences

[0281] In some embodiments, any of the vectors provided herein can include a poly(A) sequence. Most nascent eukaryotic mRNAs possess a poly(A) tail at their 3′ end which is added during a complex process that includes cleavage of the primary transcript and a coupled polyadenylation reaction (see, e.g., Proudfoot et al., Cell 108:501-512, 2002). The poly(A) tail confers mRNA stability and transferability (Molecular Biology of the Cell, Third Edition by B. Alberts et al., Garland Publishing, 1994). In some embodiments, the poly(A) sequence is positioned 3′ to the nucleic acid sequence encoding the C-terminus of the hair cell target protein. In some embodiments, the poly(A) sequence is positioned 3′ to the nucleic acid sequence encoding the C-terminus of the supporting cell target protein or a protein of interest (e.g., a Cas9 endonuclease, e.g., a SaCas9 endonuclease (e.g., any of the SaCas9 endonucleases described herein), a reporter protein (e.g., a GFP protein, a mScarlet protein)).

[0282] As used herein, “polyadenylation” refers to the covalent linkage of a polyadenylyl moiety, or its modified variant, to a messenger RNA molecule. In eukaryotic organisms, most messenger RNA (mRNA) molecules are polyadenylated at the 3′ end. The 3′ poly(A) tail is a long sequence of adenine nucleotides (e.g., 50, 60, 70, 100, 200, 500, 1000, 2000, 3000, 4000, or 5000) added to the pre-mRNA through the action of an enzyme, polyadenylate polymerase. In higher eukaryotes, the poly(A) tail is added onto transcripts that contain a specific sequence, the polyadenylation signal or “poly(A) sequence.” The poly(A) tail and the protein bound to it aid in protecting mRNA from degradation by exonucleases. Polyadenylation is also important for transcription termination, export of the mRNA from the nucleus, and translation. Polyadenylation occurs in the nucleus immediately after transcription of DNA into RNA, but additionally can also occur later in the cytoplasm. After transcription has been terminated, the mRNA chain is cleaved through the action of an endonuclease complex associated with RNA polymerase. The cleavage site is usually characterized by the presence of the base sequence AAUAAA near the cleavage site. After the mRNA has been cleaved, adenosine residues are added to the free 3′ end at the cleavage site.

[0283] As used herein, a “poly(A) sequence” is a sequence that triggers the endonuclease cleavage of an mRNA and the additional of a series of adenosines to the 3′ end of the cleaved mRNA.

[0284] There are several poly(A) sequences that can be used, including those derived from bovine growth hormone (bgh) (Woychik et al., Proc. Natl. Acad. Sci. U.S.A. 81(13):3944-3948, 1984; U.S. Pat. No. 5,122,458), mouse-β-globin, mouse-α-globin (Orkin et al., EMBO J. 4(2):453-456, 1985; Them et al., Blood 71(2):313-319, 1988), human collagen, polyoma virus (Batt et al., Mol. Cell Biol. 15(9):4783-4790, 1995), the Herpes simplex virus thymidine kinase gene (HSV TK), IgG heavy-chain gene polyadenylation signal (US 2006/0040354), human growth hormone (hGH) (Szymanski et al., Mol. Therapy 15(7):1340-1347, 2007), the group of SV40 poly(A) sites, such as the SV40 late and early poly(A) site (Schek et al., Mol. Cell Biol. 12(12):5386-5393, 1992).

[0285] The poly(A) sequence can be a sequence of AATAAA. The AATAAA sequence may be substituted with other hexanucleotide sequences with homology to AATAAA which are capable of signaling polyadenylation, including ATTAAA, AGTAAA, CATAAA, TATAAA, GATAAA, ACTAAA, AATATA, AAGAAA, AATAAT, AAAAAA, AATGAA, AATCAA, AACAAA, AATCAA, AATAAC, AATAGA, AATTAA, or AATAAG (see, e.g., WO 06/12414).

[0286] In some embodiments, the poly(A) sequence can be a synthetic polyadenylation site (see, e.g., the pCl-neo expression vector of Promega which is based on Levitt el al, Genes Dev. 3(7):1019-1025, 1989). In some embodiments, the poly(A) sequence is the polyadenylation signal of soluble neuropilin-1 (sNRP) (AAATAAAATACGAAATG, SEQ ID NO: 90) (see, e.g., WO 05/073384). Additional examples of poly(A) sequences are known in the art.

### Internal Ribosome Entry Site (IRES)

[0287] In some embodiments, a vector encoding the C-terminus of the hair cell target protein or a hair cell target protein can include a polynucleotide internal ribosome entry site (IRES). In some embodiments, a vector encoding the C-terminus of the supporting cell target protein or a supporting cell target protein can include a polynucleotide internal ribosome entry site (IRES). An IRES sequence is used to produce more than one polypeptide from a single gene transcript. An IRES forms a complex secondary structure that allows translation initiation to occur from any position with an mRNA immediately downstream from where the IRES is located (see, e.g., Pelletier and Sonenberg, Mol. Cell. Biol. 8(3):1103-1112, 1988).

[0288] There are several IRES sequences known to those in skilled in the art, including those from, e.g., foot and mouth disease virus (FMDV), encephalomyocarditis virus (EMCV), human rhinovirus (HRV), cricket paralysis virus, human immunodeficiency virus (HIV), hepatitis A virus (HAV), hepatitis C virus (HCV), and poliovirus (PV). See e.g., Alberts, Molecular Biology of the Cell, Garland Science, 2002; and Hellen et al., Genes Dev. 15(13):1593-612, 2001.

[0289] In some embodiments, the IRES sequence that is incorporated into the vector that encodes the C-terminus of a hair cell target protein or a hair cell target protein is the foot and mouth disease virus (FMDV). In some embodiments, the IRES sequence that is incorporated into the vector that encodes the C-terminus of a supporting cell target protein or a supporting cell target protein is the foot and mouth disease virus (FMDV) 2A sequence. In some embodiments, the IRES sequence that is incorporated into the vector that encodes the C-terminal portion of a protein of interest (e.g., a Cas9 endonuclease, e.g., a SaCas9 endonuclease (e.g., any of the SaCas9 endonucleases described herein)) is the FMDV 2A sequence. The Foot and Mouth Disease Virus 2A sequence is a small peptide (approximately 18 amino acids in length) that has been shown to mediate the cleavage of polyproteins (Ryan, M D et al., EMBO 4:928-933, 1994; Mattion et al., J. Virology 70:8124-8127, 1996; Furler et al., Gene Therapy 8:864-873, 2001; and Halpin et al., Plant Journal 4:453-459, 1999). The cleavage activity of the 2A sequence has previously been demonstrated in artificial systems including plasmids and gene therapy vectors (AAV and retroviruses) (Ryan et al., EMBO 4:928-933, 1994; Mattion et al., J. Virology 70:8124-8127, 1996; Furler et al., Gene Therapy 8:864-873, 2001; and Halpin et al., Plant Journal 4:453-459, 1999; de Felipe et al., Gene Therapy 6:198-208, 1999; de Felipe et al., Human Gene Therapy 11:1921-1931, 2000; and Klump et al., Gene Therapy 8:811-817, 2001).

### Reporter Sequences/Detectable Marker Genes

[0290] Any of the vectors provided herein can optionally include a sequence encoding a reporter protein or a detectable marker (“a reporter sequence” or “detectable marker gene”). Non-limiting examples of reporter sequences or detectable marker genes include DNA sequences encoding: a beta-lactamase, a beta-galactosidase (LacZ), an alkaline phosphatase, a thymidine kinase, a green fluorescent protein (GFP), a red fluorescent protein, an mCherry fluorescent protein, a yellow fluorescent protein, a chloramphenicol acetyltransferase (CAT), and a luciferase. Additional examples of reporter sequences and detectable marker genes are known in the art. When associated with regulatory elements which drive their expression, the reporter sequence or detectable marker gene can provide signals detectable by conventional means, including enzymatic, radiographic, colorimetric, fluorescence, or other spectrographic assays; fluorescent activating cell sorting (FACS) assays; immunological assays (e.g., enzyme linked immunosorbent assay (ELISA), radioimmunoassay (RIA), and immunohistochemistry).

[0291] In some embodiments, the reporter sequence or detectable marker gene is the LacZ gene, and the presence of a vector carrying the LacZ gene in a primate cell (e.g., a supporting cochlear outer hair cell or a hair cell (e.g., a cochlear outer hair cell or a cochlear inner hair cell)) is detected by assays for beta-galactosidase activity. In other embodiments, the reporter or detectable marker is a fluorescent protein (e.g., green fluorescent protein) or luciferase, the presence of a vector carrying the fluorescent protein or luciferase in a primate cell (e.g., a supporting cochlear outer hair cell or a hair cell (e.g., a cochlear outer hair cell, a cochlear inner hair cell)) may be measured by fluorescent techniques (e.g., fluorescent microscopy or FACS) or light production in a luminometer (e.g., a spectrophotometer or an IVIS imaging instrument). In some embodiments, the reporter sequence or detectable marker can be used to verify the tissue-specific targeting capabilities and tissue-specific promoter regulatory activity of any of the vectors described herein.

### Flanking Regions Untranslated Regions (UTRs)

[0292] In some embodiments, any of the vectors described herein (e.g., any of the at least two different vectors) can include an untranslated region. In some embodiments, a vector can includes a 5′ UTR or a 3′ UTR.

[0293] Untranslated regions (UTRs) of a gene are transcribed but not translated. The 5′ UTR starts at the transcription start site and continues to the start codon but does not include the start codon. The 3′ UTR starts immediately following the stop codon and continues until the transcriptional termination signal. There is growing body of evidence about the regulatory roles played by the UTRs in terms of stability of the nucleic acid molecule and translation. The regulatory features of a UTR can be incorporated into any of the vectors, compositions, kits, or methods as described herein to enhance the stability of a supporting cell target protein or a hair cell target protein or of a protein of interest (e.g., a Cas9 endonuclease, e.g., a SaCas9 endonuclease (e.g., any of the SaCas9 endonucleases described herein), a reporter protein (e.g., a GFP protein, a mScarlet protein).

[0294] Natural 5′ UTRs include a sequence that plays a role in translation initiation. They harbor signatures like Kozak sequences, which are commonly known to be involved in the process by which the ribosome initiates translation of many genes. Kozak sequences have the consensus sequence CCR(A/G)CCAUGG, where R is a purine (A or G) three bases upstream of the start codon (AUG), which is followed by another “G”. The 5′ UTR have also been known, e.g., to form secondary structures that are involved in elongation factor binding.

[0295] For example, in some embodiments, a 5′ UTR is included in any of the vectors described herein. Non-limiting examples of 5′ UTRs including those from the following genes: albumin, serum amyloid A, Apolipoprotein A/B/E, transferrin, alpha fetoprotein, erythropoietin, and Factor VIII, can be used to enhance expression of a nucleic acid molecule, such as a mRNA.

[0296] In some embodiments, a 5′ UTR from a mRNA that is transcribed by a cell in the cochlea can be included in any of the vectors, compositions, kits, and methods described herein. 3′ UTRs are known to have stretches of adenosines and uridines embedded in them. These AU-rich signatures are particularly prevalent in genes with high rates of turnover. Based on their sequence features and functional properties, the AU-rich elements (AREs) can be separated into three classes (Chen et al., Mol. Cell. Biol. 15:5777-5788, 1995; Chen et al., Mol. Cell Biol. 15:2010-2018, 1995): Class I AREs contain several dispersed copies of an AUUUA motif within U-rich regions. For example, c-Myc and MyoD mRNAs contain class I AREs. Class II AREs possess two or more overlapping UUAUUUA(U/A) (U/A) nonamers. GM-CSF and TNF-alpha mRNAs are examples that contain class II AREs. Class III AREs are less well defined. These U-rich regions do not contain an AUUUA motif Two well-studied examples of this class are c-Jun and myogenin mRNAs.

[0297] Most proteins binding to the AREs are known to destabilize the messenger, whereas members of the ELAV family, most notably HuR, have been documented to increase the stability of mRNA. HuR binds to AREs of all the three classes. Engineering the HuR specific binding sites into the 3′ UTR of nucleic acid molecules will lead to HuR binding and thus, stabilization of the message in vivo.

[0298] In some embodiments, the introduction, removal, or modification of 3′ UTR AREs can be used to modulate the stability of an mRNA encoding a hair cell target protein. In some embodiments, the introduction, removal, or modification of 3′ UTR AREs can be used to modulate the stability of an mRNA encoding a supporting cell target protein. In other embodiments, AREs can be removed or mutated to increase the intracellular stability and thus increase translation and production of a hair cell target protein. In other embodiments, AREs can be removed or mutated to increase the intracellular stability and thus increase translation and production of a supporting cell target protein.

[0299] In other embodiments, non-UTR sequences may be incorporated into the 5′ or 3′ UTRs. In some embodiments, introns or portions of intron sequences may be incorporated into the flanking regions of the polynucleotides in any of the vectors, compositions, kits, and methods provided herein. Incorporation of intronic sequences may increase protein production as well as mRNA levels.

### Primate Cells

[0300] Also provided herein is a cell (e.g., a primate cell) that includes any of the nucleic acids, vectors (e.g., at least two different vectors described herein), or compositions described herein. In some embodiments, the primate cell is a human cell (e.g., a human supporting cell or a human hair cell). In other embodiments, the primate is a non-human primate (e.g., simian cell (e.g., a monkey cell (e.g., a marmoset cell, a baboon cell, a macaque cell), or an ape cell (e.g., a gorilla cell, a gibbon cell, an orangutan cell, a chimpanzee cell). Skilled practitioners will appreciate that the nucleic acids and vectors described herein can be introduced into any primate cell (e.g., a primate supporting cell or a primate hair cell). Non-limiting examples of vectors and methods for introducing vectors into primate cells are described herein.

[0301] In some embodiments, the primate cell can be a supporting hair cell of the inner ear of a mammal. For example, a supporting cell can be Hensen's cells, Deiters' cells, inner pillar cells, outer pillar cells, Claudius cells, inner border cells, inner phalangeal cells, or cells of the stria vascularis.

[0302] In some embodiments, the primate cell is a specialized cell of the cochlea. In some embodiments, the primate cell is a hair cell. In some embodiments, the primate cell is a cochlear inner hair cell or a cochlear outer hair cell. In some embodiments, the primate cell is a cochlear inner hair cell. In some embodiments, the primate cell is a cochlear outer hair cell.

[0303] In some embodiments, the primate cell is in vitro. In some embodiments, the primate cell is present in a primate. In some embodiments, the primate cell is autologous cell obtained from a primate and cultured ex vivo.

### Methods

[0304] Also provided herein are methods of correcting a hair cell target gene defect in a hair cell of an inner ear in a primate that include: administering to the inner ear of the primate a therapeutically effective amount of any of the compositions described herein, where the administering repairs the hair cell target gene defect in the hair cell of the inner ear of the primate.

[0305] Also provided herein are methods of increasing the expression level of a hair cell target protein in a hair cell of an inner ear of a primate that include: administering to the inner ear of the primate a therapeutically effective amount of any of the compositions described herein, where the administering results in an increase in the expression level of the hair cell target protein in the hair cell of the inner ear of the primate.

[0306] Also provided herein are methods of treating hearing loss (e.g., non-syndromic sensorineural hearing loss or syndromic sensorineural hearing loss) in a primate identified as having a defective hair cell target gene that include: administering to the inner ear of the primate a therapeutically effective amount of any of the compositions described herein.

[0307] In some embodiments of any of these methods, the primate has been previously identified as having a defective hair cell target gene (e.g., a hair cell target gene having a mutation that results in a decrease in the expression and/or activity of a hair cell target protein encoded by the gene). Some embodiments of any of these methods further include, prior to the introducing or administering step, determining that the primate has a defective hair cell target gene. Some embodiments of any of these methods can further include detecting a mutation in a hair cell target gene in a primate. Some embodiments of any of the methods can further include identifying or diagnosing a primate as having non-syndromic sensorineural hearing loss. Some embodiments of any of the methods can further include identifying or diagnosing a primate as having syndromic sensorineural hearing loss.

[0308] Also provided herein are methods of correcting a supporting cell target gene defect in a supporting cell of an inner ear in a primate that include: administering to the inner ear of the primate a therapeutically effective amount of any of the compositions described herein, where the administering repairs the supporting cell target gene defect in the supporting cell of the inner ear of the primate.

[0309] Also provided herein are methods of increasing the expression level of a supporting cell target protein in a supporting cell of an inner ear of a primate that include: administering to the inner ear of the primate a therapeutically effective amount of any of the compositions described herein, where the administering results in an increase in the expression level of the supporting cell target protein in the supporting cell of the inner ear of the primate.

[0310] Also provided herein are methods of treating hearing loss (e.g., non-syndromic sensorineural hearing loss or syndromic sensorineural hearing loss) in a primate identified as having a defective supporting cell target gene that include: administering to the inner ear of the primate a therapeutically effective amount of any of the compositions described herein.

[0311] Also provided herein are methods of restoring hearing in a primate identified or diagnosed as having hearing loss that include: administering to the inner ear of the primate a therapeutically effective amount of any compositions described herein.

[0312] Also provided herein are methods of restoring synapses and/or preserving spiral ganglion nerves in a primate identified or diagnosed as having an inner ear disorder that include: administering to the inner ear of the primate a therapeutically effective amount of any of the compositions described herein.

[0313] Also provided herein are methods that include administering to an inner ear of a primate a therapeutically effective amount of any of the compositions described herein.

[0314] In some embodiments of any of these methods, the primate has been previously identified as having a defective supporting cell target gene (e.g., a supporting cell target gene having a mutation that results in a decrease in the expression and/or activity of a supporting cell target protein encoded by the gene). Some embodiments of any of these methods further include, prior to the introducing or administering step, determining that the primate has a defective supporting cell target gene. Some embodiments of any of these methods can further include detecting a mutation in a supporting cell target gene in a primate. Some embodiments of any of the methods can further include identifying or diagnosing a primate as having non-syndromic sensorineural hearing loss. Some embodiments of any of the methods can further include identifying or diagnosing a primate as having syndromic sensorineural hearing loss.

[0315] In some embodiments of any of these methods, two or more doses of any of the compositions described herein are introduced or administered into the cochlea of the primate. Some embodiments of any of these methods can include introducing or administering a first dose of the composition into the cochlea of the primate, assessing hearing function of the primate following the introducing or the administering of the first dose, and administering an additional dose of the composition into the cochlea of the primate found not to have a hearing function within a normal range (e.g., as determined using any test for hearing known in the art).

[0316] In some embodiments of any of the methods described herein, the composition can be formulated for intra-cochlear administration. In some embodiments of any of the methods described herein, the compositions described herein can be administered via intra-cochlear administration or local administration. In some embodiments of any of the methods described herein, the compositions are administered through the use of a medical device (e.g., any of the exemplary medical devices described herein).

[0317] In some embodiments, intra-cochlear administration can be performed using any of the methods described herein or known in the art. For example, a composition can be administered or introduced into the cochlea using the following surgical technique: first using visualization with a 0 degree, 2.5-mm rigid endoscope, the external auditory canal is cleared and a round knife is used to sharply delineate an approximately 5-mm tympanomeatal flap. The tympanomeatal flap is then elevated and the middle ear is entered posteriorly. The chorda tympani nerve is identified and divided, and a currette is used to remove the scutal bone, exposing the round window membrane. To enhance apical distribution of the administered or introduced composition, a surgical laser may be used to make a small 2-mm fenestration in the oval window to allow for perilymph displacement during trans-round window membrane infusion of the composition. The microinfusion device is then primed and brought into the surgical field. The device is maneuvered to the round window, and the tip is seated within the bony round window overhang to allow for penetration of the membrane by the microneedle(s). The footpedal is engaged to allow for a measured, steady infusion of the composition. The device is then withdrawn and the round window and stapes foot plate are sealed with a gelfoam patch.

[0318] In some embodiments of any of the methods described herein, the primate has or is at risk of developing non-syndromic sensorineural hearing loss. In some embodiments of any of the methods described herein, the primate has been previously identified as having a mutation in a hair cell target gene. In some embodiments of any of the methods described herein, the primate has been previously identified as having a mutation in a supporting cell target gene. In some embodiments of any of the methods described herein, the primate has any of the mutations in a hair cell target gene that are described herein or are known in the art to be associated with non-syndromic sensorineural hearing loss or syndromic sensorineural hearing loss. In some embodiments of any of the methods described herein, the primate has any of the mutations in a supporting cell target gene that are described herein or are known in the art to be associated with non-syndromic sensorineural hearing loss or syndromic sensorineural hearing loss.

[0319] In some embodiments of any of the methods described herein, the primate has been identified as being a carrier of a mutation in a hair cell target gene (e.g., via genetic testing). In some embodiments of any of the methods described herein, the primate has been identified as being a carrier of a mutation in a supporting cell target gene (e.g., via genetic testing). In some embodiments of any of the methods described herein, the primate has been identified as having a mutation in a hair cell target gene and has been diagnosed with hearing loss (e.g., non-syndromic sensorineural hearing loss or syndromic sensorineural hearing loss). In some embodiments of any of the methods described herein, the primate has been identified as having a mutation in a supporting cell target gene and has been diagnosed with hearing loss (e.g., non-syndromic sensorineural hearing loss or syndromic sensorineural hearing loss). In some embodiments of any of the methods described herein, the primate has been identified as having hearing loss (e.g., non-syndromic sensorineural hearing loss or syndromic sensorineural hearing loss).

[0320] In some embodiments, successful treatment of hearing loss (e.g., non-syndromic sensorineural hearing loss or syndromic sensorineural hearing loss) can be determined in a primate using any of the conventional functional hearing tests known in the art. Non-limiting examples of functional hearing tests are various types of audiometric assays (e.g., pure-tone testing, speech testing, test of the middle ear, auditory brainstem response, and otoacoustic emissions).

[0321] In some embodiments of these methods, the primate cell is in vitro. In some embodiments of these methods, the primate cell is originally obtained from a primate and is cultured ex vivo. In some embodiments, the primate cell has previously been determined to have a defective hair cell target gene. In some embodiments, the primate cell has previously been determined to have a defective supporting cell target gene.

[0322] Methods for introducing any of the compositions described herein into a primate cell are known in the art (e.g., via lipofection or through the use of a viral vector, e.g., any of the viral vectors described herein).

[0323] An increase in expression of an active target protein (e.g., an active supporting cell target protein (e.g., a full-length supporting cell target protein) or an active hair cell target protein (e.g., a full-length hair cell target protein) as described herein is, e.g., as compared to a control or to the level of expression of an active target protein (e.g., an active supporting cell target protein (e.g., a full-length supporting cell target protein) or an active hair cell target protein (e.g., a full-length hair cell target protein) prior to the introduction of the vector(s).

[0324] Methods of detecting expression and/or activity of a target protein (e.g., a supporting cell target protein or a hair cell target protein) are known in the art. In some embodiments, the level of expression of a hair cell target protein can be detected directly (e.g., detecting hair cell target protein or detecting hair cell target mRNA). In some embodiments, the level of expression of a supporting cell target protein can be detected directly (e.g., detecting supporting cell target protein or detecting supporting cell target mRNA). Non-limiting examples of techniques that can be used to detect expression and/or activity of a target protein (e.g., a supporting cell target protein or a hair cell target protein) directly include: real-time PCR, Western blotting, immunoprecipitation, immunohistochemistry, or immunofluorescence. In some embodiments, expression of a hair cell target protein can be detected indirectly (e.g., through functional hearing tests). In some embodiments, expression of a supporting cell target protein can be detected indirectly (e.g., through functional hearing tests).

### Pharmaceutical Compositions and Kits

[0325] In some embodiments, any of the compositions described herein can further include one or more agents that promote the entry of a nucleic acid or any of the vectors described herein into a primate cell (e.g., a liposome or cationic lipid).

[0326] In some embodiments, any of the vectors described herein can be formulated using natural and/or synthetic polymers. Non-limiting examples of polymers that may be included in any of the compositions described herein can include, but are not limited to, DYNAMIC POLYCONJUGATE® (Arrowhead Research Corp., Pasadena, Calif.), formulations from Mirus Bio (Madison, Wis.) and Roche Madison (Madison, Wis.), PhaseRX polymer formulations such as, without limitation, SMARTT POLYMER TECHNOLOGY® (PhaseRX, Seattle, Wash.), DMRI/DOPE, poloxamer, VAXFECTIN® adjuvant from Vical (San Diego, Calif.), chitosan, cyclodextrin from Calando Pharmaceuticals (Pasadena, Calif.), dendrimers and poly(lactic-co-glycolic acid) (PLGA) polymers, RONDEL™ (RNAi/Oligonucleotide Nanoparticle Delivery) polymers (Arrowhead Research Corporation, Pasadena, Calif.), and pH responsive co-block polymers, such as, but not limited to, those produced by PhaseRX (Seattle, Wash.). Many of these polymers have demonstrated efficacy in delivering oligonucleotides in vivo into a primate cell (see, e.g., deFougerolles, Human Gene Ther. 19:125-132, 2008; Rozema et al., Proc. Natl. Acad. Sci. U.S.A. 104:12982-12887, 2007; Rozema et al., Proc. Natl. Acad. Sci. U.S.A. 104:12982-12887, 2007; Hu-Lieskovan et al., Cancer Res. 65:8984-8982, 2005; Heidel et al., Proc. Natl. Acad. Sci. U.S.A. 104:5715-5721, 2007).

[0327] Any of the compositions described herein can be, e.g., a pharmaceutical composition. A pharmaceutical composition can include any of the compositions described herein and one or more pharmaceutically or physiologically acceptable carriers, diluents, or excipients. Such compositions may include one or more buffers, such as neutral-buffered saline, phosphate-buffered saline, and the like; one or more carbohydrates, such as glucose, mannose, sucrose, and dextran; mannitol; one or more proteins, polypeptides, or amino acids, such as glycine; one or more antioxidants; one or more chelating agents, such as EDTA or glutathione; and/or one or more preservatives.

[0328] In some embodiments, the composition includes a pharmaceutically acceptable carrier (e.g., phosphate buffered saline, saline, or bacteriostatic water). Upon formulation, solutions will be administered in a manner compatible with the dosage formulation and in such amount as is therapeutically effective. The formulations are easily administered in a variety of dosage forms such as injectable solutions, injectable gels, drug-release capsules, and the like.

[0329] As used herein, the term “pharmaceutically acceptable carrier” includes solvents, dispersion media, coatings, antibacterial agents, antifungal agents, and the like that are compatible with pharmaceutical administration. Supplementary active compounds can also be incorporated into any of the compositions described herein.

[0330] In some embodiments, a single dose of any of the compositions described herein can include a total sum amount of the at least two different vectors of at least 1 ng, at least 2 ng, at least 4 ng, about 6 ng, about 8 ng, at least 10 ng, at least 20 ng, at least 30 ng, at least 40 ng, at least 50 ng, at least 60 ng, at least 70 ng, at least 80 ng, at least 90 ng, at least 100 ng, at least 200 ng, at least 300 ng, at least 400 ng, at least 500 ng, at least 1 μg, at least 2 μg, at least 4 μg, at least 6 μg, at least 8 μg, at least 10 μg, at least 12 μg, at least 14 μg, at least 16 μg, at least 18 μg, at least 20 μg, at least 22 μg, at least 24 μg, at least 26 μg, at least 28 μg, at least 30 μg at least 32 μg, at least 34 μg, at least 36 μg, at least 38 μg, at least 40 μg, at least 42 μg, at least 44 μg, at least 46 μg, at least 48 μg, at least 50 μg, at least 52 μg, at least 54 μg, at least 56 μg, at least 58 μg, at least 60 μg, at least 62 μg, at least 64 μg, at least 66 μg, at least 68 μg, at least 70 μg, at least 72 μg, at least 74 μg, at least 76 μg, at least 78 μg, at least 80 μg, at least 82 μg, at least 84 μg, at least 86 μg, at least 88 μg, at least 90 μg, at least 92 μg, at least 94 μg, at least 96 μg, at least 98 μg, at least 100 μg, at least 102 μg, at least 104 μg, at least 106 μg, at least 108 μg, at least 110 μg, at least 112 μg, at least 114 μg, at least 116 μg, at least 118 μg, at least 120 μg, at least 122 μg, at least 124 μg, at least 126 μg, at least 128 μg, at least 130 μg at least 132 μg, at least 134 μg, at least 136 μg, at least 138 μg, at least 140 μg, at least 142 μg, at least 144 μg, at least 146 μg, at least 148 μg, at least 150 μg, at least 152 μg, at least 154 μg, at least 156 μg, at least 158 μg, at least 160 μg, at least 162 μg, at least 164 μg, at least 166 μg, at least 168 μg, at least 170 μg, at least 172 μg, at least 174 μg, at least 176 μg, at least 178 μg, at least 180 μg, at least 182 μg, at least 184 μg, at least 186 μg, at least 188 μg, at least 190 μg, at least 192 μg, at least 194 μg, at least 196 μg, at least 198 μg, or at least 200 μg, e.g., in a buffered solution.

[0331] The compositions provided herein can be, e.g., formulated to be compatible with their intended route of administration. A non-limiting example of an intended route of administration is local administration (e.g., intra-cochlear administration). In some embodiments, the therapeutic compositions are formulated to include a lipid nanoparticle. In some embodiments, the therapeutic compositions are formulated to include a polymeric nanoparticle. In some embodiments, the therapeutic compositions are formulated to include a mini-circle DNA. In some embodiments, the therapeutic compositions are formulated to comprise a CELiD DNA. In some embodiments, the therapeutic compositions are formulated to comprise a synthetic perilymph solution. An exemplary synthetic perilymph solution includes 20-200 mM NaCl; 1-5 mM KCl; 0.1-10 mM CaCl₂; 1-10 mM glucose; 2-50 mM HEPES, having a pH of between about 6 and about 9.

[0332] Also provided are kits including any of the compositions described herein. In some embodiments, a kit can include a solid composition (e.g., a lyophilized composition including the at least two different vectors described herein) and a liquid for solubilizing the lyophilized composition. In some embodiments, a kit can include a pre-loaded syringe including any of the compositions described herein.

[0333] In some embodiments, the kit includes a vial comprising any of the compositions described herein (e.g., formulated as an aqueous composition, e.g., an aqueous pharmaceutical composition).

[0334] In some embodiments, the kits can include instructions for performing any of the methods described herein.

### Devices and Surgical Methods

[0335] Provided herein are therapeutic delivery systems for treating hearing loss (e.g., non-syndromic sensorineural hearing loss or syndromic sensorineural hearing loss). In one aspect, the therapeutic delivery systems include i) a medical device capable of creating one or a plurality of incisions in a round window membrane of an inner ear of a primate in need thereof, and ii) an effective dose of a composition (e.g., any of the compositions described herein). In some embodiments, the medical device includes a plurality of micro-needles.

[0336] Also provided herein are surgical methods for treatment of hearing loss (e.g., non-syndromic sensorineural hearing loss or syndromic sensorineural hearing loss). In some embodiments, the methods include the steps of: introducing into a cochlea of a primate a first incision at a first incision point; and administering intra-cochlearly a therapeutically effective amount of any of the compositions provided herein. In some embodiments, the composition is administered to the primate at the first incision point. In some embodiments, the composition is administered to the primate into or through the first incision.

[0337] In some embodiments of any of the methods described herein, any of the compositions described herein is administered to the primate into or through the cochlea oval window membrane. In some embodiments of any of the methods described herein, any of the compositions described herein is administered to the primate into or through the cochlea round window membrane. In some embodiments of any of the methods described herein, the composition is administered using a medical device capable of creating a plurality of incisions in the round window membrane. In some embodiments, the medical device includes a plurality of micro-needles. In some embodiments, the medical device includes a plurality of micro-needles including a generally circular first aspect, where each micro-needle has a diameter of at least about 10 microns. In some embodiments, the medical device includes a base and/or a reservoir capable of holding the composition. In some embodiments, the medical device includes a plurality of hollow micro-needles individually including a lumen capable of transferring the composition. In some embodiments, the medical device includes a means for generating at least a partial vacuum.

[0338] The invention is further described in detail by reference to the following experimental examples. These examples are provided for purposes of illustration only, and are not intended to be limiting unless otherwise specified. Thus, the invention should in no way be construed as being limited to the following examples, but rather should be construed to encompass any and all variations that become evident as a result of the teaching provided herein.

[0339] Without further description, it is believed that one of ordinary skill in the art can, using the preceding description and the following illustrative examples, make and utilize the compounds of the present invention and practice the claimed methods. The following working examples specifically point out various aspects of the present invention, and are not to be construed as limiting in any way the remainder of the disclosure.

### EXAMPLES

### Example 1. AAV Single Vector Injection into the Inner Ear

[0340] Immunofluorescent staining was performed on cochlear tissue of a cynomolgus macaque (non-human primate) following administration of a single Anc80-GFP AAV vector directly into the inner ear through the round window.

[0341] The cochlear tissue from the treated macaque was processed for immunofluorescence analysis using Myo7a as a marker for hair cells and Iba-1 as a marker for macrophages. The middle turn is representative of the entire sensory epithelium. The data in FIGS. 1A-1C show clear GFP expression in both the hair cells and the supporting cells, including the following supporting cell subtypes: Hensen's cells (HC), Claudius cells (CC), Dieter cells (DC), inner and outer pillar cells (OPC/IPC), inner border cells, and inner phalangeal cells (IPHC/IBC). These data demonstrate successful Anc80-GFP AAV vector transduction into different cell types of the inner ear sensory epithelium, and the resulting expression of the encoded reporter gene (GFP) in these different cell types. These data indicate the present claimed compositions including a single AAV vector or two or more AAV vectors can be used to express a gene in hair cells and supporting cells, and can be used to repair a mutation in a gene in hair cells and supporting cells.

### OTHER EMBODIMENTS

[0342] It is to be understood that while the invention has been described in conjunction with the detailed description thereof, the foregoing description is intended to illustrate and not limit the scope of the invention, which is defined by the scope of the appended claims. Other aspects, advantages, and modifications are within the scope of the following claims.

[0343] All publications, patent applications, patents, and other references mentioned herein are incorporated by reference in their entirety. In case of conflict, the present specification, including definitions, will control. In addition, section headings, the materials, methods, and examples are illustrative only and not intended to be limiting.

1-87. (canceled)

88. A method of treating vestibular schwannoma comprising administering a recombinant adeno-associated virus (rAAV) vector to the inner ear of a subject, wherein the rAAV vector comprises:
(i) a nucleotide sequence comprising a coding sequence operably linked to a promoter, wherein the coding sequence encodes a vascular endothelial growth factor (VEGF) binding agent or a portion thereof, wherein the coding sequence comprises the sequence of SEQ ID NO: 95; and
(ii) an AAV Anc80 capsid.

89. The method of claim 88, wherein the promoter is a native promoter, an inducible promoter, a constitutive promoter, or a tissue-specific promoter.

90. The method of claim 89, wherein the constitutive promoter is a CAG promoter, a CBA promoter, or a CMV promoter.

91. The method of claim 88, wherein the VEGF binding agent binds to a VEGF polypeptide comprising VEGF-A, VEGF-B and/or VEGF-C.

92. The method of claim 88, wherein the nucleotide sequence further comprises a polyadenylation sequence.

93. The method of claim 92, wherein the polyadenylation sequence comprises a bovine growth hormone polyadenylation sequence, a mouse-alpha-globin, a human collagen, a polyoma virus, a herpes simplex virus thymidine kinase, an IgG heavy chain, a human growth hormone, or a SV40 polyadenylation sequence.

94. The method of claim 88, wherein the nucleotide sequence further comprises two AAV inverted terminal repeats (ITRs) flanking the coding sequence.

95. The method of claim 94, wherein the two AAV ITRs are AAV2 ITRs, or are derived from AAV2 ITRs.

96. The method of claim 88, wherein the AAV vector is administered to the cochlea of the subject.

97. The method of claim 88, wherein the subject is a human.

98. The method of claim 88, wherein the subject has vestibular schwannoma or has been diagnosed with vestibular schwannoma.

99. The method of claim 88, wherein the AAV vector is administered via intra-cochlear administration.

100. The method of claim 99, wherein intra-cochlear administration comprises delivery into or through a round window membrane.

101. The method of claim 88, wherein administration of the AAV vector reduces and/or inhibits VEGF activity.

102. A composition comprising a recombinant adeno-associated virus (rAAV) vector, wherein the rAAV vector comprises:
(i) a nucleotide sequence comprising a coding sequence operably linked to a promoter, wherein the coding sequence encodes a vascular endothelial growth factor (VEGF) binding agent or a portion thereof, wherein the coding sequence comprises the sequence of SEQ ID NO: 95; and
(ii) an AAV Anc80 capsid.

103. The composition of claim 102, wherein the composition comprises a synthetic perilymph fluid.

104. The composition of claim 102, wherein the composition is formulated for intra-cochlear delivery.

105. The composition of claim 102, wherein the composition is a pharmaceutical composition.

The application's sequence listing, which the Patent Office published only in electronic form, follows.

SEQUENCE LISTING (115 sequences)

SEQ ID NO: 1 - protein, 226 aa, Homo sapiens
MDWGTLQTILGGVNKHSTSIGKIWLTVLFIFRIMILVVAAKEVWGDEQADFVCNTLQPGCKNVCYDHYFPISHIRLWALQLIFVSTPALLVAMHVAYRRHEKKRKFIKGEIKSEFKDIEEIKTQKVRIEGSLWWTYTSSIFFRVIFEAAFMYVFYVMYDGFSMQRLVKCNAWPCPNTVDCFVSRPTEKTVFTVFMIAVSGICILLNVTELCYLLIRYCSGKSKKPV

SEQ ID NO: 2 - DNA, 681 bp, Homo sapiens
  source 1..681: mol_type = other DNA
atggattggggcacgctgcagacgatcctggggggtgtgaacaaacactccaccagcattggaaagatctggctcaccgtcctcttcatttttcgcattatgatcctcgttgtggctgcaaaggaggtgtggggagatgagcaggccgactttgtctgcaacaccctgcagccaggctgcaagaacgtgtgctacgatcactacttccccatctcccacatccggctatgggccctgcagctgatcttcgtgtccacgccagcgctcctagtggccatgcacgtggcctaccggagacatgagaagaagaggaagttcatcaagggggagataaagagtgaatttaaggacatcgaggagatcaaaacccagaaggtccgcatcgaaggctccctgtggtggacctacacaagcagcatcttcttccgggtcatcttcgaagccgccttcatgtacgtcttctatgtcatgtacgacggcttctccatgcagcggctggtgaagtgcaacgcctggccttgtcccaacactgtggactgctttgtgtcccggcccacggagaagactgtcttcacagtgttcatgattgcagtgtctggaatttgcatcctgctgaatgtcactgaattgtgttatttgctaattagatattgttctgggaagtcaaaaaagccagtttaa

SEQ ID NO: 3 - DNA, 5513 bp, Homo sapiens
  source 1..5513: mol_type = other DNA
ggggtgcggttaaaaggcgccacggcgggagacaggtgttgcggccccgcagcgcccgcgcgctcctctccccgactcggagcccctcggcggcgcccggcccaggacccgcctaggagcgcaggagccccagcgcagagaccccaacgccgagacccccgccccggccccgccgcgcttcctcccgacgcaggtgagcccgccggccccggactgcccggccaggaacctggcgcggggagggaccgcgagacccagagcggttgcccggccgcgtgggtctcggggaaccggggggctggaccaacacacgtccttgggccggggggcgggggccgccttctggagcgggcgtttctgcggccgagctccggagctggaatggggcggccggggaagtggacgcgatggcaccgcccggggtgcgagtggggccgggcgcgcgcgggaggggaaaaaggcgcgggcgagccgccagcgcgaggtttgtggtgtcgccgatgtcccttcggggtactctagcgcagccgcctggctacttgacccactgccaccaaacgttttaaattcaccgaaagcttagcttcgaagcaaagctccgtttcgccggtgaagcaggaagccttcgctgcaggaactgacctttacctcttggagcggcttctgcagaaaaatccccgggcagagatttgggcggagtttgcctagaactaacgcggagccagccgatcccggcctaccccggggccaagatttcagtggcttccctttttcctaaacacttcacgagggtctgtttccgggctgtgctccccgcctagaaggaaaatttttaggacccttgttcgcgaagaggtggtgtgcggctgagacccgcgtcctcaggacggttccatcagtgcctcgatcctgccccactggaggaggaaggcagcccgaacagcgctcacctaactaacagctgctgagagctgggttccgtggccatgcacctgggactgccttgagaagcgtggtacggccgtgtccccatgtgaccttagagtccctttcgaaactgctgtgcacagtcggtcacaatttcagacactggtgagaagggtggaggaaccctctggggacagccaggcaaggtcgaccacccatcacctaagggtggagaaatttaaggggtgaagagtcccttttgccttttctggatcctggtgattcacctagtgtcttccctaaggaactgaaccaactcctccgctggcctctggcagccctccaggcggtgcaggatggcgtgggcccggtaggaagctgcatgtaaccgcccagggtcgggaggccaggagggcagctcctcctctgacttgaatattgaaaacaacttcgtcctgcttctgagcccctcttaacccatgaccccctagcccattggggagtaaatcttaatttactcctcttcctgaaaaaggatctttaaaacaggtagcttcaactcaagctttataaaataacaatatagggtttctcggaactgtatttttctcagctgatggtaactggacaggtctgtagaagggtgtatgacctgggtttggcaggtggaagagggcaaaggataaacccctcctcctgcagccccatattcttggccaggtgtattgttgtaaaccaggagagagtttacttcggggagtatcctgttttccactcagtgagggccaatgaagaatgtctaattccataagatgcttttgttaaaatcggaatgttgctgtcctcggtggttctgctgttgggacgggactggcctgagctgtgggtgctgtagcaggacaaccagctcacctaagggcctcccagtctggattatcaatgggtcagtgctgaacctgggctaaaatattgttttttccaatgatgttgtctttcccaagctcagtgaagctaaatgtttcacaggcctatgtcaatctgatgtaactttcgtggccacctctctcctgttagcctctgaccaaggtggcactggatggtttctgcctgaccttggtgccccgtggcagcgactgtgggtcatgaaagacattcactacgagcctgcttctggagtccatcagaaaacgggatgcaacttgcctaaaatgaggagaggaggatgcttttaagaaaaagaagaaggaggattcactaccagctctgaagggtggaaaagagatgattcatccggattgtggagagggtggaatcttgtttaggagagcgttggttgtggcaggcagggtgtaactatgaatcagtgaagacaattcacatcctgggatgaaaagaaggccatgggctcacaggagattatccactggcctctccacatccgcttgcagtaaggagtgtgggactctcccaagcttcagcgctgaactgcaatgcagtgacgtcgcttagctgggccagtaaccgagggagttgaattttctgtcattttaaaataatgtgtcttttaagaaacactttgaaattaaaaccacagcccacaattataatgcactgttgcagcacttatcaaaacagatatgctaactgagccatcagtgccagcctgacagtgaggccaccaagccatccacaaagcctacacgaaagtctgtgctcacagtggcttttctccatgaagagggcattcctaacctcttcctttcacgtaggaggaagcaaggtcctttgtaaaattttaactcggggtgcctcaaatgtaaacttaaccactggtaacaacagtttcactgctacatgccacgtctgtgaaaattcattcaagacattaaggaaagtggctcagcagagagactagacatcttatcctcacggttctcctgtacttggcctctcagcctttgagcaaggttggcccaagctagtatcggccccagtggtacagccaaaacttgagactgcaaatggatgcagctgttgaacgctgagtaacttctgcagagtcaggaagacccaaggaagctctgcagaggatgcaggggtacggtcagaacccctgagtgcctttcagctaacgaggactttatgacactccccagcacagcaaatttttatgatgtgtttaaagattgggtgaattactcaggtgaacaagctactttttatcagagaacacctaaaaacacgttcaagagggtttgggaactatacatttaatcctatgacaaactaagttggttctgtcttcacctgttttggtgaggttgtgtaagagttggtgtttgctcaggaagagatttaagcatgcttgcttacccagactcagagaagtctccctgttctgtcctagctagtgattcctgtgttgtgtgcattcgtcttttccagagcaaaccgcccagagtagaagatggattggggcacgctgcagacgatcctggggggtgtgaacaaacactccaccagcattggaaagatctggctcaccgtcctcttcatttttcgcattatgatcctcgttgtggctgcaaaggaggtgtggggagatgagcaggccgactttgtctgcaacaccctgcagccaggctgcaagaacgtgtgctacgatcactacttccccatctcccacatccggctatgggccctgcagctgatcttcgtgtccacgccagcgctcctagtggccatgcacgtggcctaccggagacatgagaagaagaggaagttcatcaagggggagataaagagtgaatttaaggacatcgaggagatcaaaacccagaaggtccgcatcgaaggctccctgtggtggacctacacaagcagcatcttcttccgggtcatcttcgaagccgccttcatgtacgtcttctatgtcatgtacgacggcttctccatgcagcggctggtgaagtgcaacgcctggccttgtcccaacactgtggactgctttgtgtcccggcccacggagaagactgtcttcacagtgttcatgattgcagtgtctggaatttgcatcctgctgaatgtcactgaattgtgttatttgctaattagatattgttctgggaagtcaaaaaagccagtttaacgcattgcccagttgttagattaagaaatagacagcatgagagggatgaggcaacccgtgctcagctgtcaaggctcagtcgctagcatttcccaacacaaagattctgaccttaaatgcaaccatttgaaacccctgtaggcctcaggtgaaactccagatgccacaatggagctctgctcccctaaagcctcaaaacaaaggcctaattctatgcctgtcttaattttctttcacttaagttagttccactgagaccccaggctgttaggggttattggtgtaaggtactttcatattttaaacagaggatatcggcatttgtttctttctctgaggacaagagaaaaaagccaggttccacagaggacacagagaaggtttgggtgtcctcctggggttctttttgccaactttccccacgttaaaggtgaacattggttctttcatttgctttggaagttttaatctctaacagtggacaaagttaccagtgccttaaactctgttacactttttggaagtgaaaactttgtagtatgataggttattttgatgtaaagatgttctggataccattatatgttccccctgtttcagaggctcagattgtaatatgtaaatggtatgtcattcgctactatgatttaatttgaaatatggtcttttggttatgaatactttgcagcacagctgagaggctgtctgttgtattcattgtggtcatagcacctaacaacattgtagcctcaatcgagtgagacagactagaagttcctagtgatggcttatgatagcaaatggcctcatgtcaaatatttagatgtaattttgtgtaagaaatacagactggatgtaccaccaactactacctgtaatgacaggcctgtccaacacatctcccttttccatgactgtggtagccagcatcggaaagaacgctgatttaaagaggtcgcttgggaattttattgacacagtaccatttaatggggaggacaaaatggggcaggggagggagaagtttctgtcgttaaaaacagatttggaaagactggactctaaagtctgttgattaaagatgagctttgtctacttcaaaagtttgtttgcttaccccttcagcctccaattttttaagtgaaaatatagctaataacatgtgaaaagaatagaagctaaggtttagataaatattgagcagatctataggaagattgaacctgaatattgccattatgcttgacatggtttccaaaaaatggtactccacatatttcagtgagggtaagtattttcctgttgtcaagaatagcattgtaaaagcattttgtaataataaagaatagctttaatgatatgcttgtaactaaaataattttgtaatgtatcaaatacatttaaaacattaaaatataatctctataataatttaaaa

SEQ ID NO: 4 - protein, 780 aa, Homo sapiens
MAAPGGRSEPPQLPEYSCSYMVSRPVYSELAFQQQHERRLQERKTLRESLAKCCSCSRKRAFGVLKTLVPILEWLPKYRVKEWLLSDVISGVSTGLVATLQGMAYALLAAVPVGYGLYSAFFPILTYFIFGTSRHISVGPFPVVSLMVGSVVLSMAPDEHFLVSSSNGTVLNTTMIDTAARDTARVLIASALTLLVGIIQLIFGGLQIGFIVRYLADPLVGGFTTAAAFQVLVSQLKIVLNVSTKNYNGVLSIIYTLVEIFQNIGDTNLADFTAGLLTIVVCMAVKELNDRFRHKIPVPIPIEVIVTIIATAISYGANLEKNYNAGIVKSIPRGFLPPELPPVSLFSEMLAASFSIAVVAYAIAVSVGKVYATKYDYTIDGNQEFIAFGISNIFSGFFSCFVATTALSRTAVQESTGGKTQVAGIISAAIVMIAILALGKLLEPLQKSVLAAVVIANLKGMFMQLCDIPRLWRQNKIDAVIWVFTCIVSIILGLDLGLLAGLIFGLLTVVLRVQFPSWNGLGSIPSTDIYKSTKNYKNIEEPQGVKILRFSSPIFYGNVDGFKKCIKSTVGFDAIRVYNKRLKALRKIQKLIKSGQLRATKNGIISDAVSTNNAFEPDEDIEDLEELDIPTKEIEIQVDWNSELPVKVNVPKVPIHSLVLDCGAISFLDVVGVRSLRVIVKEFQRIDVNVYFASLQDYVIEKLEQCGFFDDNIRKDTFFLTVHDAILYLQNQVKSQEGQGSILETITLIQDCKDTLELIETELTEEELDVQDEAMRTLAS

SEQ ID NO: 5 - DNA, 2343 bp, Homo sapiens
  source 1..2343: mol_type = other DNA
atggcagcgccaggcggcaggtcggagccgccgcagctccccgagtacagctgcagctacatggtgtcgcggccggtctacagcgagctcgctttccagcaacagcacgagcggcgcctgcaggagcgcaagacgctgcgggagagcctggccaagtgctgcagttgttcaagaaagagagcctttggtgtgctaaagactcttgtgcccatcttggagtggctccccaaataccgagtcaaggaatggctgcttagtgacgtcatttcgggagttagtactgggctagtggccacgctgcaagggatggcatatgccctactagctgcagttcctgtcggatatggtctctactctgcttttttccctatcctgacatactttatctttggaacatcaagacatatctcagttggaccttttccagtggtgagtttaatggtgggatctgttgttctgagcatggcccccgacgaacactttctcgtatccagcagcaatggaactgtattaaatactactatgatagacactgcagctagagatacagctagagtcctgattgccagtgccctgactctgctggttggaattatacagttgatatttggtggcttgcagattggattcatagtgaggtacttggcagatcctttggttggtggcttcacaacagctgctgccttccaagtgctggtctcacagctaaagattgtcctcaatgtttcaaccaaaaactacaatggagttctctctattatctatacgctggttgagatttttcaaaatattggtgataccaatcttgctgatttcactgctggattgctcaccattgtcgtctgtatggcagttaaggaattaaatgatcggtttagacacaaaatcccagtccctattcctatagaagtaattgtgacgataattgctactgccatttcatatggagccaacctggaaaaaaattacaatgctggcattgttaaatccatcccaagggggtttttgcctcctgaacttccacctgtgagcttgttctcggagatgctggctgcatcattttccatcgctgtggtggcttatgctattgcagtgtcagtaggaaaagtatatgccaccaagtatgattacaccatcgatgggaaccaggaattcattgcctttgggatcagcaacatcttctcaggattcttctcttgttttgtggccaccactgctctttcccgcacggccgtccaggagagcactggaggaaagacacaggttgctggcatcatctctgctgcgattgtgatgatcgccattcttgccctggggaagcttctggaacccttgcagaagtcggtcttggcagctgttgtaattgccaacctgaaagggatgtttatgcagctgtgtgacattcctcgtctgtggagacagaataagattgatgctgttatctgggtgtttacgtgtatagtgtccatcattctggggctggatctcggtttactagctggccttatatttggactgttgactgtggtcctgagagttcagtttccttcttggaatggccttggaagcatccctagcacagatatctacaaaagtaccaagaattacaaaaacattgaagaacctcaaggagtgaagattcttagattttccagtcctattttctatggcaatgtcgatggttttaaaaaatgtatcaagtccacagttggatttgatgccattagagtatataataagaggctgaaagcgctgaggaaaatacagaaactaataaaaagtggacaattaagagcaacaaagaatggcatcataagtgatgctgtttcaacaaataatgcttttgagcctgatgaggatattgaagatctggaggaacttgatatcccaaccaaggaaatagagattcaagtggattggaactctgagcttccagtcaaagtgaacgttcccaaagtgccaatccatagccttgtgcttgactgtggagctatatctttcctggacgttgttggagtgagatcactgcgggtgattgtcaaagaattccaaagaattgatgtgaatgtgtattttgcatcacttcaagattatgtgatagaaaagctggagcaatgcgggttctttgacgacaacattagaaaggacacattctttttgacggtccatgatgctatactctatctacagaaccaagtgaaatctcaagagggtcaaggttccattttagaaacgatcactctcattcaggattgtaaagatacccttgaattaatagaaacagagctgacggaagaagaacttgatgtccaggatgaggctatgcgtacacttgcatcctga

SEQ ID NO: 6 - DNA, 4928 bp, Homo sapiens
  source 1..4928: mol_type = other DNA
ctcagccttcccggttcgggaaaggggaagaatgcaggaggggtaggatttctttcctgataggatcggttgggaaagaccgcagcctgtgtgtgtctttcccttcgaccaaggtgtctgttgctccgtaaataaaacgtcccactgccttctgagagcgctataaaggcagcggaagggtagtccgcggggcattccgggcggggcgcgagcagagacaggtcatggcagcgccaggcggcaggtcggagccgccgcagctccccgagtacagctgcagctacatggtgtcgcggccggtctacagcgagctcgctttccagcaacagcacgagcggcgcctgcaggagcgcaagacgctgcgggagagcctggccaagtgctgcagttgttcaagaaagagagcctttggtgtgctaaagactcttgtgcccatcttggagtggctccccaaataccgagtcaaggaatggctgcttagtgacgtcatttcgggagttagtactgggctagtggccacgctgcaagggatggcatatgccctactagctgcagttcctgtcggatatggtctctactctgcttttttccctatcctgacatactttatctttggaacatcaagacatatctcagttggaccttttccagtggtgagtttaatggtgggatctgttgttctgagcatggcccccgacgaacactttctcgtatccagcagcaatggaactgtattaaatactactatgatagacactgcagctagagatacagctagagtcctgattgccagtgccctgactctgctggttggaattatacagttgatatttggtggcttgcagattggattcatagtgaggtacttggcagatcctttggttggtggcttcacaacagctgctgccttccaagtgctggtctcacagctaaagattgtcctcaatgtttcaaccaaaaactacaatggagttctctctattatctatacgctggttgagatttttcaaaatattggtgataccaatcttgctgatttcactgctggattgctcaccattgtcgtctgtatggcagttaaggaattaaatgatcggtttagacacaaaatcccagtccctattcctatagaagtaattgtgacgataattgctactgccatttcatatggagccaacctggaaaaaaattacaatgctggcattgttaaatccatcccaagggggtttttgcctcctgaacttccacctgtgagcttgttctcggagatgctggctgcatcattttccatcgctgtggtggcttatgctattgcagtgtcagtaggaaaagtatatgccaccaagtatgattacaccatcgatgggaaccaggaattcattgcctttgggatcagcaacatcttctcaggattcttctcttgttttgtggccaccactgctctttcccgcacggccgtccaggagagcactggaggaaagacacaggttgctggcatcatctctgctgcgattgtgatgatcgccattcttgccctggggaagcttctggaacccttgcagaagtcggtcttggcagctgttgtaattgccaacctgaaagggatgtttatgcagctgtgtgacattcctcgtctgtggagacagaataagattgatgctgttatctgggtgtttacgtgtatagtgtccatcattctggggctggatctcggtttactagctggccttatatttggactgttgactgtggtcctgagagttcagtttccttcttggaatggccttggaagcatccctagcacagatatctacaaaagtaccaagaattacaaaaacattgaagaacctcaaggagtgaagattcttagattttccagtcctattttctatggcaatgtcgatggttttaaaaaatgtatcaagtccacagttggatttgatgccattagagtatataataagaggctgaaagcgctgaggaaaatacagaaactaataaaaagtggacaattaagagcaacaaagaatggcatcataagtgatgctgtttcaacaaataatgcttttgagcctgatgaggatattgaagatctggaggaacttgatatcccaaccaaggaaatagagattcaagtggattggaactctgagcttccagtcaaagtgaacgttcccaaagtgccaatccatagccttgtgcttgactgtggagctatatctttcctggacgttgttggagtgagatcactgcgggtgattgtcaaagaattccaaagaattgatgtgaatgtgtattttgcatcacttcaagattatgtgatagaaaagctggagcaatgcgggttctttgacgacaacattagaaaggacacattctttttgacggtccatgatgctatactctatctacagaaccaagtgaaatctcaagagggtcaaggttccattttagaaacgatcactctcattcaggattgtaaagatacccttgaattaatagaaacagagctgacggaagaagaacttgatgtccaggatgaggctatgcgtacacttgcatcctgaaagtgggttcgggaggtctctatgagcaaggaatacaagacaaaacttcctcaatgcattgactatttcttcagactcaaaacactcattcttttttctattaagccattgaaagagaagcactaagactgcttctaggctttatttataaaataaacaccttatccctaacatgggcaaaatggctagaattattcagacgatttggcagcgtccagggtaagctggtgttataatacgctgctgatctacatcacagatttgctaataatgttcacgtgggccctggcatatctctgttcagttagagtgagtgctgacccaacagcctctgtggtcaagcgagtcacgaatgattaatcataaagaaaaatcagtttttgactgacctggatatccatgagctgcactgatcaccatgtaaggtcacatttagtaaatgctgaaataaaatgattaatgcatttatcaataaaagcctttgaaaatactttggataataaattggagttttaaaaatgcaaatttgcttagtatctaataatgaagtgttattacatatagccggaattgaggatctctttgatcctggaaatggtttacctaaaagctacagaaccaggccaatatattttgaaatattgatgcagacaaatgaaataataaagagattttcatggtttataaaaatcttttttgatatgataataatcatgatcacaactgagatcaaaaaaatatatgacagattattttgtttaaaaatgcagttttaattatcttagtctatagaaatgatcattgcatggaggcatgtataggtatgatctgtgtaaaatctgacataaaaacagtgctattctgagtgaaaatttttttgatgtgcttacataaccatggtgattaaaatgagtttatattttttctcaaaaattttagcagtgtgtaaagtaagtaatctttaactgaactctgaccacttaaaaaaaaatctaaaaattgaactacctatagtagtctgtgtttaaagtgaatttttaaagacaaagcattctaaatgaactcaatataaaaacattcatttggaatgtacatactgaaaaatacaggtttttttgaccaaaagtttttatatcttttctttttatttatttttttcctaagtgccaacaattttctagatattatatacaacacaggctttgatcttggggacttttcccatatatttcacactggagtgaatgaagttgtacttcatttctagagaaaagttatacccaggtccccaattgagaatgtcttgcttgattgaaaacgacatcatcccttggtatactccagggattggtttcaggacccctgcatttaccaaaatttgtgcacactcaagtcctgcagtcacccctgcctaaagatagaatggcttctctgtttttcttctgaaatacaaccagaaacaatgtgtctatttctgaaagaataggattaatgatcatacaaatgggttaatcctgaattctggttgtaaatctggttacagcataactaggattataatgctgcctcattttcacagcactacttgcttatattgacaacaaatcatctcgctaaagagtgaatgtaggccaggcgcggtggctcatgcctgtaatcccagcactttgggaggccgaggcgggtggatcacgaggtcaggagatcgagaccatcctggctaacatggtaaaaccccgtctctactaaaaatagaaaaaaagaaattagcctagcgtggtggctggcgggcgcctgtagtcccagctatttgggaggctaaggcaggagaatggcgtgaacccgggaggcggagcttgcagtgagccgaggtcgtgccactgcactccagcctgggcgacagagcaagactccgtctcaaaaaaaaaaaaaaaaaaaaaaaaagagtgaatgtaatagtcttgcagaaaatgaatgaatacctttgttcaataaaggaaatatgcactgctcacttttttgaaggaaatgccaaagttacgttttacaacaaggctagagtttgtaaattctgggttcatttgtgatgacataagtcagcaaactgcgggaatactgtctcttctatgtattttgtgaatagtaagcataattttagttttgtattatcaatgaaaatttcacttgaaattaaagctgccttttgttatatttttaacctataggataagattccagtattgtatatgagttttaacaaattaaaaaatcaaatcatgtacatttgaaaatatttgcacacatttaaaaataaatgtaaagttgtcttttaaactactcggatgtgtcctttctgaacaa

SEQ ID NO: 7 - DNA, 57175 bp, Homo sapiens
  source 1..57175: mol_type = other DNA
ctcagccttcccggttcgggaaaggggaagaatgcaggaggggtaggatttctttcctgataggatcggttgggaaagaccgcagcctgtgtgtgtctttcccttcgaccaaggtgtctgttgctccgtaaataaaacgtcccactgccttctgagagcgctataaaggcagcggaagggtagtccgcggggcattccgggcggggcgcgagcagagacaggtgagttcgccctgaagatgcccacaccgcccggcccgggctccactcccggggaggcctcgagggttgcggatgggactcttaagtggtcacggatcaggtgggcagggggcagtacagctttctttctgagacgccgagagcgaacaggctgctcggaaaacaggacgaggggagagacttgctcaataagctgaaagttctgcccccgagagggctgcgacagctgctggaatgtgcctgcagcgtccgcctcttggggacccgcggagcgcgccctgacggttccacgcctggcccgggggtctgcacctctcctccagtgcgcacctggagctgcgtcccgggtcaggtgcggggagggagggaatctcagtgtccccttccagccttgcaagcgcctttggcccctgccccagcccctcggtttgggggagatttcagaacgcggacagcgccctggctgcgggccataggggactgggtggaactcgggaagcccccagagcaggggcttactcgcttcaagtttggggaaccccgggcagcgggtgcaggccacgagacccgaaggttctcaggtgcccccctgcaggctggccgtgcgcgccgtggggcgcttgtcgcgagcgccgagggctgcaggacgcggaccagactcgcggtgcaggggggcctggctgcagctaacaggtgatcccgttctttctgttcctcgctcttcccctccgatcgtcctcgcttaccgcgtgtcctccctcctcgctgtcctctggctcgcaggtcatggcagcgccaggcggcaggtcggagccgccgcagctccccgagtacagctgcagctacatggtgtcgcggccggtctacagcgagctcgctttccagcaacagcacgagcggcgcctgcaggagcgcaagacgctgcgggagagcctggccaagtgctgcaggtagcggccgcgcgggcctgcgtagagagaagcggagcggggcgtccacgccttggggagggaagggcgtccccagcgggcgagagtggggtgcgggcggcggagcccctgggcgccagctgcttctcccagaggcccgactttcggtctccggtcctccacgccgcccttctggtgggagggtggctccatcagtctcgggcccgaaatgaacttacctgggaaactcgcctttggggagagtgggttctaggagccccgtctctctttttcctctctgaaggaaacttggagtgcctcttggggtacagtgggtccctgttgccttcttgggagcttgtttaaatgaaatgaatagggaaacccagctcttgaccaggaggagtccttgaaacactcaagctaagtaggcgggctaccattcagttagagaccaggatgcaagctagaacccaggggagcgcggggtgtgccaagtacttcatcagcaggctgtgggacccctggggaaagccaccctcagtctctaaacccaaacatgccgtaactagatgtcacaaacataaagaaattagagtttctaaaacctttcattatagaacatttcaaatatatgcataagtagacgtagtagtataatgaactccccacccccaccgtttttaacccatcactcggcctcaactgtgatcaaatccaagttactcttgtttcttgtatctacacctacttgctccctccagtattatttttaagcaaatctcatatagcatactgtctttatgtattttactgcatatctttaaagactcttaaaaaatataaccacatttcatgatcacaccttaatatctaaaaataacctcctaatatcaaaaattgagtcattattaaaatgtccaatcgtcccataaatgccttaattaaaaaacaatttattcaaatcaggagttataccacctacttttgatatttttctttcatctgtaggtcactgaatttaaaaactaccaagtagcaaggtataaggtatacattcctcatgctaagatttttgtaaaaactagctccaggcttgtattgccaaaatatactcagtgtgtttatcttctttaaagaaaataataataataaggcgcctggattaggagtctgaaaagtaatctccatttagagactccacatccatcagtctctggctggaccagaaaataggtttttgtgtaggaatattttttcagaggattaaaaatgtgagcgaggggtgggacacttaatcctgtgttctctagaagagtgcatttaaaaggatagatacagttcttggcaaaagcatggtaagcacttcagggttattattttccaggaaatacttatcctttttccaaatagttataaacatcagcagaatccagttcataactttgtgatttgcaaattggttgtgactgagattggattgaaaacccagttttcttgctttttgacagttgttcaagaaagagagcctttggtgtgctaaagactcttgtgcccatcttggagtggctccccaaataccgagtcaaggaatggctgcttagtgacgtcatttcgggagttagtactgggctagtggccacgctgcaaggtaagatgttggcagattgagagttctggtctccagcaggagtttaacacttctccccagctaccataggtctgtgacagatggttgcttacccttcaaggcctgtatctttcctgtagagccccttagtggagagagtcacctctcttctccccttccttagagttctcttcctgggaaactgctgccccactaggtgcagaggtccaatttagaggcatatactaggcagtggcttctcaatttttttaaattttattttatttgagacgggggctcgctctgtcacctaggctggagtgcagtggcgcaatcctggctcactgcaagctccgtctcccgggttcacgccattctcccgcctcagcctccccagtagctgggactacaggcgcccgccactacgcccggctaattttttgtatttttagtagagacggggtttcaccgggttagccaggatggtatcgacctcctgacctcgtgatccgcctgccttggcctcccaaaatgctgggattacaggcgtgagccactgcacccagccagcttctctattttcattgaccacaattcaataagaaatgtgtaaagagtttcaagtcaagatttaaaaaaaaaaaagaaatgtgttacatcctgatatatacatatatatctaaagttcctgtgaaatatttattataacaatgtgctaatctttcactttgttctattatgcttaggttttttaaatgatgattgcagcacattaaattattttatatccacacgtggatcttttttgttggtttgttttgctttgctttttagagatacagtcttgctctgtcacccaggctggtgtgcagtggcacgatcttggctcaatgcaacctctctgcctctcgggttcaagtgattcttgtgcctcagccttctgagtagctggggctacaggcatgtgccaccatgtccagctaattactgtatttttagtagagatggggtttcgccatgttggccagggtggtctggaactcctaacctcaagtgatccgccctccttggtatcccaaagtactgtgattacaggcatgagccaccatgcccagcctcccacacgtggatcttgaggtgtagtttgaaactggcttaaggaaaagtgaagggagcttcctagcctggactccacatgaatgttttgcctgcccctcatccctttttaaaaaaattcatcctcttattttaatgtgtgggaaaatgtgccaacataggtggttatttgttcttttataaactgagttcataccataatattcccataagcatcttagaaatctgttgtatagttggtgcctagcagcatggcattctcctctgtcccctatccccaccatctcgtttctgccccacccccaacaccctgaccaatttcccaaagaccctgaatcatgaaaacagaaatatcgttatttattataatttgtgaaacacctaatatgttccaggcactaggtatgctgacacgaataagatgcatcctctgcttccaaggaactcatagtccaatggagaaagagaaaacaattcaatgtgataagggctgtggcaggggagtgcaaattacttgctaagggagtgcaaatgaggttcactcaaagcggtcttaggggatcttgaatagcttcctggaagttgaatgtcaaagctgagtttccctgatggctaagtctgagtttgccaagtgatgggaagtagggtggggtggggatggcttgaaaatagactatttcagaagctagtaatgaatgttgagcaatattgtgagctaaaatttggctatggagctttcaagattgctcagatcaggccaggtagatgcccgaagagaaggaggatggcctatgaacccagggtggagcctcagcctgatcaagcatgttcttaatcacaaaggtggacgggagagagactaggatgggctgtgtggttcctaagttaaacaatgccaagtattctacactgtgctctaagggctgtgacatggtgacaccctgtgactcctgggggacaggaaccatgcctcattcatgtttgttcagcaggtgcctagcacagagacaggcacataatagatggtatatttagtgaaaaagattgaattgcattcctgataatgaatcttctttatatataaaaaatggtggttcatgctccatgtctccccagttttcatagacaagtatcttataagaattcattttgtttataagcatgagacactatgctaagtaagaatgttgccagctatctcatttaatcctcataacaatcctgctaggtaggtctattattatttcattttcagtaggtgaaaaaatctattaaatcttgcccagggtcacgtggctggtaagtggtacagctgggattttaatccggtgtctattgtgtagttccttactttatgggtaagatgcttttctagaaacattatctctataaagttttctgtgtaaggtgaatttctgggaggttaatctggctcagttacacatccatttatcattcattcacttaataaatatttataaactaattctgtagaccaggtatccagccatgtgcactcagtggttcattaacaggcacaggtgctgacttcatggagctttgtaaaattattttgaggggtagggatgggaattaaataagtagataaatagaaaaataattatagattgcaatatctattgtggtggattaaatatactgcaatagggattaatttgaaaggtggatctttatttttatatttttttgagacagggtcttgctctgttgcgcaggctggagtgcagtggtgagatcacagctcaccacagccttggcctcctgggcccaggtgatcctcccatctcagcctcgccagtagctggaactacaggcatgtgccaccatgcttggctaatttttgtattttttgtagagacaaggtttcaccatgttgcccaggctggtctggaactcctaggctcaagttatctgcctgcctcggcctcccaaagtgctgggattagaggtgtgagccattgtgcccagccaggaagggaggtctattttagatataatggtcaaggaagaacttactgagaaggtgaaatttagtaaaagacaagagaatgagaaggagacagccatgtgataagcagaaaaaaagagtgtaccaggtaaaggtgcaaaggccctgaggccagaaaacttagcattttccagggaggaagaggaagaattgtagtgtggatgagtgcagtgggggagggtgagtaaaccatgaaataaactgaggcaggactgggattaggatgaggtaagggaggcactcactctcaggatgcctctttaaatattgtaccctaggaaactcatttgcctcaccctattcctggccctgtggggatattgctgtgaattaaagggagaatgggtgtgtcagcttgaaccagatgatgcaggctatgaagagagctgcaagataggaatatattgtgcagcaagaatcactgacacataatgatgagtgtggatgaaaatcactgatgcctccaaggttgttggcttgagcaaccggatagatcattacatcatttatctaaatggcaaagacaggctgaggagcaggtttgggataggaaatcaagtttccttttggatatgctaagtttgagacacagggtgagacatctaagtggagatgccacctagagaagtgggagctactgcaagtgtgaaggttagaggagaggtctaggctagacataaaaatcaggaaagcattgctgaagaggtgatatttacaagagtgggaatgcctgtgattacctaggaagaaagggcaggtgtagaagaaaagagagccagagtacttagaagttaggaaggcaaggagaggggcagccaagaacctgagaaagcctggcgcaggaagttgaagacaaagaacaaccaaaggaatgtgggatcagaagccaagagagaaggtttaaaaaaaaaaaaaaaaaaaaaaaagcatagaggggctgagagtgttgaatttgcctgaggggtggggtatgatgaaggattacagactgcttttaagaagttttgccatgaatcagagggagataagagatgaagacagagtgaagggagaatttgtttttcttaatatgggagatactagaacgtatttgtgaaccgataggaatgacctagtagaaagaaagagatctgtggtgcaagaagtacaagagaaataactagaagcaaagtagtaaaaaggggcaaacgtggaggggtttgagaatggaactaggagaactactccttaaaggcaggagggatatttcttccattttcaaaggaagatagcccaaatggtgcagatgcagacgggtttgaaattttgatgaaaagtaacttgggagcatctcatgcattctgtgttttcgattaaatgcagaatatgtcccttaactttgagtctggtggagaagggtttgggcagattgaggtaagtaggggaggtttgaatagttgtctcaaggagaggaaaggcacaccccctgaggaaatgtaactgggtccccaggcagtgttgagtgcccatctagcacttgtggtcacacattttacatgaaattggttagcccagatgtagatgccttcagtccagtttatctagctgctcaaaggctctcatggataaggtagatgtttgaggtcagccaaattggggttttgccagacaagaaaaggaaggaaagagagagtgaaaaaagggagttaagaatatttgcaaaattccatggaatctgtgtgggcaagggtggaagtgaagacaggaaggtgtggaggatagagagaaagtggatcggttaattaattagaagcctcgtgagcacaaataaatgttgcaataaggattctgcagtagatgagctggaaggtttggaggctgtagctggagagaggctcaaaattcagattttggaggtggtggtgtggtttccagtgatgacaatgtccatgccacaaccactggctgagcagctgagtagtagaacaactccgagaagaccagctcaggttactgggaagccaggaagttgctaaggatgatgggatctttgtgatttttgttattaaaacaaattcccatcagacagcaaaagatcgatgcaacccttgtagtgctatttttattcacaactttaaggagtctgctgtctgctttctccttttgacttttatgtatttgtttgtttaaacaacagaaatttatttctgcaacatgaaggtgcctgtagattcagtttctggtgacagcccgtcaccttgctgcgtcctcacatggtggaaggctttacctttagaagaaatttaaatttaatataaatttcaactgtttattagcacctgctttgccagtatttgtcaccatgctataaatcatgactaccaacagagaaattctatcatttaaatcaatggctcagatttcttctaattttttttcttttttgagactctttctcacacaggctggagtgtagtggtatgaccttggctcactgcaaccactgcctcctgggttcaaactatccttgtgcctcagcctcctcagtagctgaaattacaggcatgtaccaacacccccagctaatttgtgtatttttagtagagacgagatttcaccatgttggccgggctggtcttgaactcctggcctcagtgatcttcccacctcagcctcccgaaatgctaggattacaatcatgagccatcacacctagccccagatttctttacaaattgtgtaattttaaaactgttgtaccaagtttctttataataaagatgattccagtatatttgagtagtagtggtccctaaatgggacactctgtatgaaaactgaaaagttccccttttccaggcatattaagaactgcagagcccagtttggggaaatggaagtttgagaaggacttgaaaaatgtccatatgaaatagacaagttgtgctttcatcccctgctccttcttttcttatcttccttctgtggagtcaccttcctattttattccatgctgttgggactactgactattgcaattcctgtttgtaatttacatattaaaacaattgtactaatagatatatttttctagaatacaaactccactagggcagagactttgttttaacagtgcctgacacatggtaggtgcataatcaactgttgttgaatgaatgaatgcttattgtagaaaactagaaaatacatataaggaacatgaaaaaatacctccactacaaactagaagtctcctctgatcctaccatacagataacccattgatatttcagtaaatatcttactaggcacataaatacttatctatataaaagtataatgaaatgtctggaaataataagcaccaaattcaggataattgttgccttctgagggtagagggaggaaagaggatgtgattgaggaagagtatactgagagtttccgctgcattggcagtaatttatttcttaagctagatgatggatacatgaaagtttattatattattcattgtgtattgtgtttcttgtatatgtaaattacttcatattttattcaaaatacctccagatttttttttttttttgagatggagtcttgctctgttgcccaggctggaatgcagtggcgcaatctcggctcactgaaacctccgcctcctgggttcaagcagttctctgcctcagcctcctgagtagctgggattacaggtgcctacccccatgcctggctaatttttgtatttttagtagagacggggtttcaccatcttggccagggtggtcttgagctcctgacctcctgatccacccacttcggcctcccaaagtgctgggattacaggtgtgactcaccgcgcccggtccctccggctttttttaatgcgtacactcccacaggctggagtgggagtgtattttttacaaaagaggaagcatacatacctatcagttttgaatcttgattttactcacttttttccctcttacttcacatctctccacgttactgaatgtacttctgagcatcacatcaatttcatttcatagaattacgaagtatgaagcataacttagttaaccacttccctgcttggggacattcatctgataagtaatattgagtgtgtgggggccagcatattcaggctgttgccatttttaataaactactataaatgtaattccttattaatgactcaagagtgaaaaggcttgattttctctcattgtgagtgagtgaagggtgaggaggtaaaacggagtaagatatgctggctacctaagtatttaaccaaggaaaagaatgtcattatcctcttctaaccctcatgtaaactagaatgttgatttctctatagccaggcattaatgggtctgggggctgctgccattgcctagtggaggagttggtcaacttcatcagggtagagttgtcttgtctgctgctgagtataattatcatattttttctttgggtctaacttttcttccccaccaaaaaaggagaaagggcagtgtaacaatgactgtgtccctcagaacgcagagaaatattgagctcagacacaactgcctctgtgcaaaactggtctgagcctttggagtgaattgaccaaaacttttttttttcttttttagacataaggtcttgctctgttgcccaggctggagtgcagtggcacgatcatagcttgctgtaacctcaaactcctgggctcaaacaatcctcctgcctcagcctccttaataactaggactacaggcgtgaaccaatatgctgggctcattcattttattgtagagatggagtcttgctatgttttccaggctggtctcaaactcctgggctcaactgatactcctgcctatggcttcccaaagcactgggattataggtgtaggacaccaggcctgaccaagtttttaatcaacatttgacttgattgttttttcccactgatctgattggtggaagactgaattactgatcaactgagtccattcatttgagcaggtgatgtttgtagatgcaatcattgttccaggtgatttggatcctgttctgcatcctagcatagccagtctgtatgcaagataaggagaccaactcaggacaggctgatctgttgaaactgtaaattgagagtatctgtgtaaaggcccttctttctgcagtagaaagacagatgctcctctacttctcatgagttacatcctaataacccattgcaagttgaacatattttaagtcaaaaatgcacttaatacacctaacctatggaacatcatcgcttaggctatcctacctgaaatgtgctcagaacacttacaataacctacagttgggcaaaataatctaacgcaagcctattttataataaagtattgaatatctcatgtagtttactgaataatgtactgaaagtgaaaaacagaatggttgtatggttacttaaagtatggtttctactgaatgcatattgcttttgcatcatcataaaggcaaagtcataagtggaaccattgtaagttgaggactttctgcatactgtaactttggtttgtgaatgtaatcactttgcatgtgctttcagggatggcatatgccctactagctgcagttcctgtcggatatggtctctactctgcttttttccctatcctgacatactttatctttggaacatcaagacatatctcagttggtaattataagtatattttacaattatatttgctcatgtttaaagtgttttggctatattaagtgcattatacctctattaggttggtgcaaaagtaattgcggttttcacaattatacttttaattgtgaaaaccgcaattacttttgcaccaacctaatatatctgtgttaatgttgtcagggaaatgggatttcagtgttttgcctgctttttctattcactgatgttaggtaacttttttaatgaagtggaaaaataaaaaaactgaaaatgacagcctactttaacattttagcatgttttgctttttaaaaacgtgatcaatttgactccatttttggagtcataatgacagggaaaaaatgacacaaggtctttgaacctaccattttactggattaacttagaaattactaagtatgttcatcaaatacatgttcatgatttaattaaagagcatacttattttaaatcactaatattagaagactggcaaaatcttaccaaaacaatttagaagctaagcttggctttctttcttggtatggcttataataagttttcctgctattcctaaaatttgaattctcgtttgttagaatgtcctagtaaatgagtgttttaatgctattttgtgactttgacatttatactagagaaaattttgctcctacatccatctgctggctagacatgtctacctcgatgatcctcttgaaataaatgcaaccatctactttatccccaacccatgtttttgtccttagttgtatttccttagaaggagatcagaaagaggttttgattgaaagaacttccacaccttggagaatcaatcagtgttgagtgcttgactagatgaggaacatggaagctggtttttctctttggtattctatacattgagatattccaggtgactggggttgggttttgagacctcaaaaccataaagccttccatgatgagagggtagaatcatcatcatcgtcatggataaaaataacagtagtgaacggagcaattgctgaaaaaaaaatattttttaaaatataaaatcttacagattgacatttgatatgaaaaaatgttttgtcttacaaaaagagaaagaaacttcatactccctttgctgtttttttaatcctaacttcgaccctgtgatattgatcaaggtactcagatccacagagatcaggacattggacactctaggaaattaatgagattatatgaaataaaagttgagcggaacaagtaaacactcaatgtatgtgctacctttgccagaaaacctttcctgacaactctcatccctgtccccaccacccatacacatgaggatcacacacagacaggttagacgaccttttgatatactcacgaagcatcctgaatgttgtattctaataactacctacgtgtctctctcgcctatttctaggtcatgaatgcctcgagatatctgcgtttttagcttctttttgttgttgttgagacagaatctggctctgtcacctaggctggagtgcggtggcgtgatctcagctcactgcagcctccacctccccagctcaagcaatccccccacctcagcctcccgagtagctgggaccataggcacgcaccaccacacccagctaatttttgtcttattttggtagagatggggttttactatgttgcttaggctggtctggaactcctgggctcaagcgatcttcccacctcagtctcccaaagtgctgcggttacagatgtgagccactgggtccggctcagcttctttcgtgaacaaacaatattttcctagtcacagctaaatcttttatacattttttaaaccctatgcagacacattgaacatttgtgattaataactgattaattgttagagactttttttccccaggaccttttccagtggtgagtttaatggtgggatctgttgttctgagcatggcccccgacgaacactttctcgtatccagcagcaatggaactgtattaaatactactatgatagacactgcagctagagatacagctagagtcctgattgccagtgccctgactctgctggttggaattatacaggtaatgaacttacaagtaaaatatagatggatgtaatttttatttgaaattaactttaaagcatatagacttaaagattctactaaaaacaaaacaaagtaatttcctggaacccaaaattattttctaaattacgttgttttaggtcaggtgctaaaatagtaagcaagaccccacttattaaggctcacttatcatcaaagtcagagacagaaaaaagcacagaagaacatgtgtgattcaattgaggatgagagaagggaaatatacgggaatccataaaggagaaaaagtgttctggtgagcggagacacaggaccgaaagccacataaataagctctgggtttttgcttttctaagtacatgtatagaaatacttcaaggtttttattacacttagttttcaaattttagagtggtggaggaaggggagtgatagggtattaagaaattcatatttttttctaccagtatttttgtgctataggcaggctactagtgttttcattggtattaagcttgatgtaatatttccagagagtaggtttctatctcaggcaaacatttaatttttctttccttttccttatcgtagttgatatttggtggcttgcagattggattcatagtgaggtacttggcagatcctttggttggtggcttcacaacagctgctgccttccaagtgctggtctcacagctaaagattgtcctcaatgtttcaaccaaaaactacaatggagttctctctattatctatgtaagtgttgcttcttgctccagggatgggtcactgttcattccagaaacaattgtattcattctctgagtctgggccaggcgtggtggctcacacctgtaatcccagcactttggaaggccgaggtgggcagattgcttgagcccaggagtttgagacgtgagacctcatctcttaaaaaaaaaaaaaaaaaaaaagaaagaaagaaaagaaaagaaaaagaaagaaaaaatccaaaaatccgaaaatttgctgggtgtggtggtgcacacttgtagtctcagctacttgggaggctgaggtgggaagatctcctgagccctggaggttgaggctgcagtgagctgtgatcgccccactgcactccaccctgggtgacagagcaagaacctgtttcaagcaaaaacaaaatcaaaacaaaacaaaacttgagtctgggagcacccacatttctttctttctttctttttttttttttttttgagacagagtcttactctgtcacccaggctggagtgcagtggcatgatattggctcaccacaacctccacctcccgggttcaagcgattctcctgcctcagcctcctgagtagctgggattacaggcgcccgccaccacacccagctaatttttgtatatttagtagagacagggtttcaccatttgggccaggctggtcttgaactcctgaccttgtgatccacccacatcggcctcccaaagtgctgggattacaggcgtgagccaccgcgcccggcctgggagcacccacatttctctatgcatactttgggagccattgaaaacatttggttgcttctgtcagaaatactattgtacttaaaaacattaatgaaaacaaagtggtctaatgaagtaaaggctgctctggaatgtaacagacttgatttctagcctcagctttgtctctaacaggtaagtgaccctggatacatcatgtagggtgctaattgaaagctcagttttagaactggatggaccttgattcatattctggctctactgtctactagccatgtgagccaatcaccatgcctcagtttccttctctgcaaaattgggttagtaatagtatatgcctcattggattgttaaataagaatagataagcacttggcccaggggctggtacataacaagtactctaaataaaggagttattttgaaatgattatttcaagccatcttttcttttttattggtgaaatgaaatgattggagatgtatctctaaaagctttttctaaccataagagtccgtaaaatgcataatgtaaatgtctcaacaattataaatgaaaaggaacattagattcagagatgattcaccatgcaaaagaaatgcaaaagcaggatgtagatcacactaattagatttgaaaaaggttttggatctaaaaatgtgttctacataaagcatgttattgatgcttgaaaaatggtgataatagtaacatgatgtcatcctagcttggggggaatgataccatacaaaaataacgtgtcaacattaagaatggagtttgagtctttaaagacccacctattagcttctaaaacaatgtaaggccatgtacacatatctaagaattggtgagtatgtcaataattgctcaattttataacggtgccataatcccatactattacactccatccattcaacaaatattaccaagtgcttactacaggccaggtactatgctaagcagtgagaatagacagaggaggcagaataacatagtgaataagatcatgaggccaggtgtggtggctcatgcctgtaatcccagcagtttgggagactgacacaggtggatcacttgatcccatgagttcaagatcagcttgggcaacatgacaaaaccttgtccctactaataatacaaaaataattagacatgcattgtggcacgcacctgtagtcccagctacttgggaggctgaggtgagaggatcacctgagctcaggaagttgaggctgcagtgagccgagatcatgccactgccttccagcctgggtgatgggagtgagaccctgtctcaaacaacaataacagcaacaacaaacaaaaaaccaaaaacaaacaaaaaagatcatggactttgaacttcaacagacttgagttggcatcttggttctccacccactacccatgatgtttatactcaacttccctaagcctcagtgtcctcaattgtaaaatgggagtagtaatagtagctacctcttagagcagtgaggattgaaaaagaaaatacgtgtaaggcacttagcacaatatctgtcacatagtaagaattgagtttattattattattatcacagatgaatagacctcatgaagctcgccgttcatttcctcgggacccagcctattaggaaacattagcaaaagtttttgattcagcattatatgggtcattcttgatatgttttttcctgtcaaatcctcagttttctattaaaaaagaatttttttttttttttgagacagggtcttgccccattgcctgggctggagtacagtagcacagtcatagctcactgcgacctccatctccctgtgtcaagcgattcttccccctcagcctcatgagtagctggaactacaggtgtgcaccaccacacctggctaattttctttttctttgttgaattttagtagaggcaatgtcttgctatgttgcccaggttagtctcgaactcctgagttcaagtgatcctctcactttggcctcccaaagttctgggattaaaggagtgagccaccatgtccagcccatattttaaaattaaaattaaaattttaagattttattttggtagagacaggggttttgcaatgtcgcccaggctggtcttgaacccctggcctcaagcagtcatcttactgcatgcctcctaatgtgttgggattataggtgtgggccactgcacctggccaatccttagttctttttgagacctctgactgccttattttgacaggctctgtaacttttgcagctcctggcacatcttgcttttacttacttttacattttctccatcaaatgttcactcatttattccttcattctcattcattcagtttatctactcaataaacacatattgaatacttaccatgtgccaggcactgttcactccctatacaaacccagtgactcattaacctaccaagacatctcttactgagtattctcacctcactgggcaaacattgctaggccttcatctacacagatcgcaggaggtccaaactaattgttgacctgggtccatggccatttcaggacccctgcagaacaggagaaatagttcttctggtctcataggattatgtttaagaagaaactttctgcaaatgatttcactttgacagggacaaaagtgagcaggaaacactagaccaaggtcaaaaatagtttttaaaccaagtgcagtcattatgtaacttacttcctgttgaatatttttcttgaaatctcagtttagcatacagcatagaattttgcaagaaactcctcacaggccacccaagttggaaaaggtatttcagtcatccctatatggtggtgaatataagtttgctcttctgaaaaaaaaaaaaaatcagcaggtctgaaaacgattgcatagggttaaatgagccgcttagtctctgaacagagaattttgcttatgacattaccattgcaattatacatgaaagaatccttcaataaatgcagagtagtagaggattctcccagaaaagactgtaagattgttgtaaaatactttacctggagtgttaacttatctttgttctaaggttgcactttggtttgtcctgccctctcccccaaaaaggtgctgacaactagaagtaacaaatgcaaagaaataggggagaaaatattagaagaaaaagaaatcagttaatttacaaatgtcagagatactggatgtaggaggcagaagggagaatgacagggtattggcagcaatttagaattagtcaatacccttgatgctaccatgtagctactcagttatctaagtaaatcccagtccacttaggggttgatttcccaccactcaatttgaatggtttgtctcagtagacaagggtgagagctttgaaagccaccactaagcttgattagatttgttactttgtacctatttcagtatgtaaaatttatacattgtattaaagtaacactttaaggattgatctatacatgtatacacaaaagatatggaaggaaatgcctgacagcaaaaggtggtcgtgaagcatttgtgatattcgtagagataaaataaacaaaaataaattcagttccaatagtaaactgatcaattttctcatacacattattgggcataattttttcttacggtttcataaacacaggtaatcctgggcaagaacaaagaaattatctaaatgaaattgtcctaaaattttccaaacacagcaggaaatataataaaatattatctattaccaaaaagttcattatcataatttgaattatttggaatactaagctaaaatacagaattatatgtgtatccatactattaacatactttatggtattttaacagtaaactaaattagaagtactgttcagtgtttttgtagagtctaatttctatgtcgttaaatataatcttatattattatataatataatcttatattattatataatcttatattattatattatataatcttatattatataatcttatcttatataatcttatattatatgctcttatataatataatcttattatataatcttatcttatataatataatcttattatataatataatcttattatataatataatcttatcttattatataatataatcttattatataatataatcttatcttattatataatataatcttattatataatatattcttatcttattatataatcttatcttattatataatataatcttatcttattatataatataatcttatcttattatataatataatcttatcttattatataatataatcttatcttattatataatataatcttataatataatcttaacttattatataatataatcttattatataatcttatcttattatataatataatcttatcttattatataatataatcttatattattatataatcttatcttattatataatgttatattattatataatcttatcttattatataatgttatattattatataatcttatcttattatataatcttatattattatataagtataatcttttattatattattacataatatataagtataatcttatattattatataatattattattatacaataataatgtaaactgactattgcagtttacatggtgagttttatttctgcacagattaaactttctatcatagagctcttcttaaaagattctgaatgactactcaatatgtaggcaacttatttacatactcagataccttgcatgatgcaattctgtaatataaactgattttggtttttgaacctcgtgttacatttctaatccaccagacatactttttattcaaaggtctaattgattctcatggattaaactggaatcctgtagtgattatttttgtaaggtaaaaatgtttgtgtgattgggataatgattccaaatgttttgtttttcaagttttaatttttgcatcttgagttgaaaagtacacctttaatgaatagacaattcatcaaaatgttatacctagctcctgaattaattagggtcattcatcagaaaactgattatgtaaaggaccaaacagcaatgataaccttcaagcctctgggataggtagggctgtttgctcctgtgctaaatgccctaagttcttgttatcgtgtctgctggtggtagttatcccattttctttttcactctgctgtccctggcatcatcttgtttctgtcagtgtaaatgcctttagcaattttcagtgactctgaaaaccagacaaagtgaatttgttagtactggatttcaagaaagagcaaaagtaccctctgagtgaaagttcaagagtcttcctacaagttaaatgcctgaactctagtccaagtgtttggtgggaggtattttgcatgcataatagcttctcccccatttccttactcttcttgaatgtgttccagagagctgaggttgctggcaaagtgactcctagattacttaaggttcattaagtacttaaagttcattaagctcatacataattgtcaccagattatcattataattattttaaaagtagtttatctgtgaaaataagtaaaatacattttataaatgttataaactataagatgctccattattttatcttcctataaaatatgtctataaaaaagctcatttaaagaaaagttaccttcactgtgagattgtctcaaagaaatgtctcaaagataccttcttaaatcctgccttctacaggactgaagttaatataacaaagatattagtgttcttccttgggattcttccttgctaatttccttgaaaacacccttgattcccagaagtctcctatttacaaaacaaaactagtttttcttgaattgattcatctgtctacttaaagattttttttggccagttgtggtagctcatgcctgtaaccccaacactttgagaggttgggcaggaggatttcttgaggccaggagttcaagaccagtctgggcaacaaagtgagacaccatcccctgcccccacctcctcccgccccaatctctacaaaaaataaaatagcctatttattgtactctctacaataaataaaataaatatagatgcctgcctgtagctccagctactctggagggtgatgtggaaggattgcttgagctcaggagttcgaggccactgtactccagcctgggcaagagagctaaaaaaaaaaaaaaaaaaaaaaaaaattttttttatgttatcttagttcaagtttgagaaataaaattaagtaccaaatttattcccaaaaatgtatgcttgtcaggagatatacctaatgttaaatgacgagttaatgggtgcagtacaccaacatggcacacgtatacatatgtaacaaacctgcacgttgtgcacatgtaccctaaaacttaaagtataatttaaaaacaaaaaacagaaaaaaactacagattcaattcagctttaggaattaaaaaaaagatttgatgtaattatatcattataaaatcaaattttttaaataaaacatgaaattgttttaatttaaaaaaaagtatgcttggcctatatgtcaattcaatagcttttctttgccagaaagaatgaagtcagtctacctgtatccacatatgaagtattttaggattttttgtaattttttgttattatctatatcattcaggtttaggaaagaactttacctaaaatactggctaattgtgccccaaaaaaaagaaagctagaaagaaagaacacacacacacacacatacacacatatacacacacaaaaaaaacaaccaactgatcaactgggagtttcaggtttatcagcctttagtctcaatgctgtatcactgtagtaaaaatcaggctacttgatagcacctagaaacccattttaaaatataaacttgtaaagcatttctgtaagtaaaagttagtatgtttataatgacattttttcttttaagacatctttattattatcataaaaaatacagagaagcaaaaataagaatgtagaaatcacccagtttttcctttccaagtaaacaatcataaaaaacttggtgtatatatatattgcagcaattgtatgtatgtaatggtctctgtatcaaccaacacatttttatcattttactgaaacttttgagtgttgtttgatgctgatatcatggtttttcatgtgggaagattcatatgagaattgattgtgtgtgtgtgcgtgtgtgtgtgctcgtgtgcgtgtagcagcaggaagtatataaaattattttctttttatagacgctggttgagatttttcaaaatattggtgataccaatcttgctgatttcactgctggattgctcaccattgtcgtctgtatggcagttaaggaattaaatgatcggtttagacacaaaatcccagtccctattcctatagaagtaattgtggtaagtagaatatgtagttagaaagttcagcattatttggttgacaaacaaggaattattaaaaccaatggagtttttaacatcttttgttttatttcagacgataattgctactgccatttcatatggagccaacctggaaaaaaattacaatgctggcattgttaaatccatcccaagggggtgagtgtggtgttcctcttagtactaatacattaagtcagtaagtcagtcttttttatttaaataaaaccttttattacaagcttcatttcactgatactccttcaatagtcctatttgtgtgtgatctggaagaaacaaccataagacaaacagtatgtgtgtagataaacgtcaagccatttgtttaaaagcagcccgtatatgctcttttttcttcattttcttaaaacatggcagaacatgtacggttaacaccagagtcctgatttaaacttatacataacattataatataatataaatagaatcatttctcagtaacatctattgcactgtgaacaatctgcttaaggaatcagggacgtctggcctaaattctctatcatttagtttaatcaattttggataataattatatcctcgtacccataagtaaaatgcattatcttcaagggaagttttagaaacatttggtagtttggtgaattagaagagtaaaagatcaaggtccttcattcatctctgtcaccttccagttttgtgacctgaggagattctcctatataagacaaggataatgaaaacagccgaagcctcaactcaagcttattatgaaacaccagtgagatctctcatgaaatgaagagtagtcaagacaccctacaccataattttctcatatggggttacaaaggaggcctagacgtttattatatttgtaacatacactcataacatttaagactagacttgctgttaatcaagaagtactagttttccctaagactggaagagtttggtaccggtgtttctaccaggaaagggagtggaggggagggaagggcacggagccactgtttggtaccagtgtttgttttccatgctcttaatagaaacttcctcaggcaagcttattcccagagcttattctacagggaactgctgtattcccatttgatgaatcttataatttcctctaatatctgttccaaactatttgaaaaagcacagctggctacatgggacttaatttgcatgctatccattacagtgtttctcaaacttacccttttgtaagaatcacatgggatcctttttcacacagattcctggttcccaccccaaacctattgaatcaggctttccagaggtggggctcaggaattaatatttttcaaaagtgcctcaagtgattcttgccctcaaggaaactggagaaactctttaagagaggatcaacaaatctaatctaacaactagataatttcattagttagaaacaattacagaaaaagatactttacagatctcttttgtcaggcttcctaggatgtatcaagttataggtggtccacagagcaggccctgtcccatccatccgtgttccattagttggtttagggaactcatttcttctgccctaaattatccctccaggtcctctgcagagctttcctgtgctctcctcctgagaacagatttctagcctctcgcccttgagtttaatgaagctgaatcctttgacagaccacctggtcagcttggtcagctaatttaacctgcctggccccagggactttaagctactccatgagggcagtgaccccattggtgttgttcagctctgtcccagagcacagagctcatctcacagtaagctctcagaaaacacttgttgaaggaataaaatacccaagcctatgtcattataaacaagccacaacaaaggccttggttatctgatctcacttggtagcacagaagcaattctgatgatattaacaaacctgaaaaagaaagggagtggagagattggaaaaaagcaagcagagttttaaagtggccctgaggtgagcacagtgaaaggaagagggacagagagattgtgatatgcccccttttgatctcctccctgcttcaatcctccattaaggctgctgctcgtagttccctttatcctattgagggtccataagttaggatcactcctaacctaggaccatacgttaggaccataagttagtccccaataacaatgccccattggacagccaaaaacagtggctccatgcccttccctctactccctttcctggtagaaacatacaacttttccttgtccagtcaacacctaagcgccccactaggattcactcattctcccatcctgggtgctttcttaaccagcagacactatgagggccagtcatgtgcctctcttctcatgcaactggtccttatctgcaactcgtaatctgcccagttcctcactcatcctgcccaggcttctcttttacctcttctgttatagtggtgtgtgtgtgtctgtgtgtatgtgtgtgtgtgtgctcacgcacgtgtatgtgtaaacccataacaagattgacagctctgtcctctaaattttaatccctattcactctcttgcctcctgtccttgccagttccagaggtccccttgttgtcatgtttgttactctcttttttcttttcttttctttaacagagtctcactctgtcacccagcctggaatgcagtggcatgatctctgtggtgtgtgtgtgtgggtgtgtgtgtgtgtgtataaacccataacaagattgacggctctgtcctctaaattttaatccctattcactgtcttgcctcctgtcttcgtcagttccagaggtcctcttgttgtcatgtttgttactctttctttcattctctttctttcttcccttccttccctcccttccctccctttcctaccttccctcccttccctcccttccctccctttcctacctgcactccctttcctccccttcctaccttccctccctttcctccccttccttccttccttcctctctctcttttttctttctttctttctttctttctttctttctttctttctttctttcttttctttctttccttctttctttctttttcttttcctttctttccttttctgaaacagaacctcactctgtcacccagcatggaatgcagtggcatgatctcggctcactgcaacctctgcctcccaggttcaagcaattctcctgcctcagcctcctgagtagctgggacaacaggcacacactgccatgcctggctaatttttagtagagacggggtttcaccatgttggccaggctggcctcaaactcctgacctcaggcgatctgcctgcctcagcctcccaaagtgctgggattacaggcactgttatagaccccttttgtcaggtttcctaggatgtatcaagttataggtggcccgcagaacatgccctgtcccatcaatctgggttccattcattggtttggggaactcaggcctactgttgtttttaaagtatgtgctttgcagttgtacttgaaagtgtggcacaggggcaaagccaacaaaaccacagggtttttttcctggctgctttctgagggctactcttctcctctagctggagtggtggtgcatttgccaagtgttcagacccagtctgaagtactctggtattctgtttggtattctgtttatgacgctggcctgtcgtttgtggaattttgggcccttcagggttcacttctcccggtcttcatcttttcagataagtgtgtgttcacatgctcactcccttgggctcttcatagtgttgtcttatgatcaggcctgacatgcttggctggggccaaacaggcccactgagcaaaaaatttggagagttatatccacagaaggagggcaagggcaagggcaaggacaaaaggcttacttacaggtcattagaagatatccagacgggacttcaattggtttggggcaaataattggcacacttagggttcagcaagacagcagacatgagtggcaggagtatgacagacttagattctcccaatatataccaagaacctactatatgtgtagacactaattacttacttacacaagtgattcctcattgaatcatatgagaagaatatatagtccccatttgacagctgaggaaactgggatgtggtgggtttaaataacatgcctaaagtcatttgagagtgattctggtcctttgacttaagtctttgcactttacactttgcacacctggataatcaaggatcaggtcatatttggagaactaggcagccaggcaggcaaagtgcattaggctgctatcaaaactaagctgtatgtgaaactggaaagttatcctgacaagtccgagtgacctgaagtagggttgactgggtctcaggagcaagtcaggagcctgttttgagaagtgtggtcccaagtcacatcccaactagcaggtgatgtcatgctgagtcgcccaactgttggatcagggtttccaacatcctgtctgtctacagatggggttcattccacagtctcattgtggggtaggatgggatataaggagaaaaggagtctgaaaattaacctcactggtagggagagtaaggctacaagggcagagaaccagacagatcttgttaggtaggaaatcgtctaatatctaacatttagacctggacccactaactgacatcaagcaaatcacttcacgtttccaggtctaagttcctttatcaacaagacaagacaagagtggtggattcaacaatacctaggatgctttctctatggttttctctaagaaccttatttctattttatttttaccactgttctctaattataggggaaaatgtagtttccttattaaagaaactttaggcataagtgatgtaggtcggggagacctttcatggctgggggcctctggaattataccatatggatagtcatcaagatataggtccatctcccaaattttcatatttgagagaacctcgtggtataatgtgtaggttaatttttttatatggtttgtagggtagctctggttttgtcaaacagtagtcattggaccccacaatcactgagatattttagtcactatggagcgttgtgataattacattaatttaatcttttttgccttaagaagattttaaatgtcctggctctcaaaggattttccactgagctcttttagcttcatacattctttgtctctttaacagagctgatacctcttcaaacacagtaaatctcatattatggctagaatctcttttaaattcaaagaactttaagatggaattgtggaaggagaaacactaacatgtgaaatggcatggatggggctgtatgatattaaagaatcagtaacagcagatttattcatgtgagagatagagaagagtcagcatggctaggctcaaaaatagaggacaaagaaatcagccagtaagataacaccaacttctgattaaacattataaaagctgctactatcatgtatgtatttcgtgtgctttttgttcttttggatcaagtactttcatgtctaatatgtgactgagcagatatagcatttgatgagatggggaaaaaggatggtggtcaaatcttcacagcatttttcacttaaaaactcactaggtttttgcctcctgaacttccacctgtgagcttgttctcggagatgctggctgcatcattttccatcgctgtggtggcttatgctattgcagtgtcagtaggaaaagtatatgccaccaagtatgattacaccatcgatgggaaccaggtatgggtgcccttttgctgaactggttttatagggctggaaacaggaaaaaaacataaatggaaaagattttggtgtcagctaaagaaggggttggattctttcaccagaccttattgggttggttttcctcttgtgtttgctaattagaaattattttggaatagacacactgcatcactttgcttttttaagaaataagttgaaataacactaattttaaaagagctaattcagtcaggtcataaataacattcaaagtgaacatattaggtcagaaagagaattcttcatgtaacccagtacctcttggcaattatttttaacggcagttataatgtgacaaaacagtgcaacaaacattaataatagttgtgaccactttaaattgaggtggttcactgtgcagttaatatatacaggcaatttttgtaggcatgtgatacattgccaggtaagctgatttcacactgcttgcaaatttgcaagttctgtatctatatgtttctgaaaatacagtatagcaataacagtagttaaatggttagtaatcaagcagaataacagcactgctagtcataatatgcttcatagtgaatattcaaccacagaaaaacactttatgtgagagctgcagacattccattcactaggcagtgaaaaagcttagcaaatgatcaggtgctatttcttgtcaactttaaaaattatcgagagcaatgagacctctctcagatggtatggcgtccaaactcctgatgtcgtacaaggaccccaagtacctatcacggtaaaaattaaattggaccaccacgcagagtaggcatgggagttttcattcttaatgtacttcctgaaatactcagcgaaggtcttgcaaagattcaatttgtaggatcgttgtcatccagtctcttccttaggaattcattgcctttgggatcagcaacatcttctcaggattcttctcttgttttgtggccaccactgctctttcccgcacggccgtccaggagagcactggaggaaagacacaggtaggaacaacagccttatgatatccatctcagagaacaagtcgaggaatggcaacagaggaaggctcgcaccgagcttagcaggacaatttgcctttcagacttgtacttcctaatctgattcacctcaggcctattcctcttgttccactccctcacctgaaatctcttaaaaaacaacatgtatggttttctgatacagtgattctcaaatctatttgtcagtgcttacctgtcatgtagctacacttacctgctgtggtcaataacaactgacaaggaatcagtaatgaaggatgctgatttttgttaatttgttacctggggagacagatggcctggtaaaagcgcttcctggctttaggagctattctattttcaggaaagtgaaaagctctattcacatttcctttagaaggatcaggaacttcctccaggggcgtttggtcccacagaacaacagtttgctagccaagaatatttttgttgtaacatttttggcatttcttcctgagtaagatttatgttgttgaagttctgcatgtgggtttaatcttatcttttaaatgtggtttgcagttgttgcctttacaaggtggccaaaaagccagcatcctagttaatctctggataatccctccttcagtgttcagaaagctcaggagccatactcaaaggccactctttccagcaggacacagtcgaagagaccacaccaagcagatgggcacaagagacagactcaggaattttgcttctgtctcttatgccttgaggtccttatcttcccaacacagaaagaactattatttaggagtaagaagtgcattgagactccaaagaacaacaaacccaaactacatagtgcaatacacacacacacacacacacacacacacacacacatgcacacacacatgcacagtcttcacagtcttcaaatgggttttactaaggcggggacacttaaaaaataaatataagtcgggcacagtggctcatgcttgtaatcccagcactttgggaggctgaggtgggcggatcaattgaggtcaggagttcgagactaacatggccaacatggtgaaaccccttctctactaaaaatgcaaaaattagccaggtgtggtggtagatgcctgtaatcccagctacttgggaggctgaggcaggagaatcacttgaacctgggaggtggaggttgcagtgagccaatatcgtgccactacattccagcctgggcgacaagagctagactctgtgtcaaatatatatatacacacacacacacacacacacacacacacaaacatatatatatatatatattctcatatatatatacgagaataactgaaaaaactaatgactccaacagtgacttgcccagggagggctttaattgtccccaatatgcatgtgatgctcctttcctatttataatggatcttgtgacagacttggaagaattggcctcttccagttttttggctgcttttcaacaaaaaattttattttcagaatttttcttaattttttattttttttgcaaatatttccagctctgagggagcaggtaaaataatacagctcatatccggaggcatagccagagatctgtggtcaaggggaagaggtcagagccaatttccaaagctgtgcacatttcaggctgcagctgtcagcagcaggaacttctgctgctttcatttgagacggagcactgacaagctctccagagcacatggtcttcagcgggtgcaggcaaatctcaaactgctgatgtccattctcctgatgttacctccaggctcaaatgaggcatgggctggctgtcccagtaagtatgcccatgtaaagtgacctccttggcacagggtttgggggataatggtgctctggtaagctaataccccctgccacatactggcatgtattatatttaggaatgaaggatgccaggatttcagcattaaagaatgaaacgagtaaagaaatggcttcatgtttaattattgaaatgtatactaaattctggggttaaaagtctaagtgcctgaactgaaatccagggactgatggacaaataaactggcagggcttctcttgtgtggcttctcgtgttttctcttatgttggaacttcagtttcagcatctacaaaatggaaatgataattgcatccatttcacagggatattgtgaggattaggcaagaaaatgtaaagccttagcacatacttgtaaatgctcattgtttcactcctttaggcaagaatagcatcttagcatctatgatacatatattgtgcctggcacataagaagcacctggcatatatttgctgaatgaatgaatggaagaatgagtattggtggacacgaactgtttttagcacatctacagattgtagaagaattaaacattggaaccttttctttccctcacccccatctgacttccactgactcacagaaaagtaattctgattacaaaccactctttagctctgattaccccctcccttaacagaataattttttagtaactgaatctggttgtagatataaagtctacagagtttctcacaaacaagccttatcaagtaagtagaaataattgatcactcaccaattttaatatagtggccaaaatgagccttggcctcccataattggagactcattatgacatataattggcaagtaggtggccactctcctggcatgagtttggcagctgactgtggtccttgtccccaaatctccatatctttctccagttcacagagctccccatccacagtgagatgcaagtggctcggtaaatactggttgagtaattgcatgcaaggaaggaagggagggataagggaaggaaagaaagaagaaaatggaaggaaggacaagggagaggaagggaagggatatgaaggaaagcgaagagaagggagggaagtaggatatcagcttctctgcttagtcaggagaagggaaagagcaccagggtactgggaatctaggatggggataggaagagcatagaaaagccagccagacatacaaagcacgctttttagtacctcatacacatcatattgcctcaggctgacccaactataatctaaatataaatgatcaatttgccaggtagagcaagtgctttctaattttctgtttatatttgctgtgtctgtctcccgtaactcagaccttttgcactagacagtacttgtgctcaacaaaatcttcccagttgtttcctctctgattgctttgcttgtagttccctgtctccttttcttctttgtttcagagcttctaatcttcatcttggctctgccccagctgtctcaacagagaattcattggtcatctaatcaaacgagagagtagtccccaccccctcagcctctctcctaactagtatggatcttaggagagctatttttgccagcgaaggtaaagtttctgaagcttccttttacccctgctattgccccgttactccatagtcactgtttcaggctgccttggggcaaagctctgagcctgcctccgtggaactgtcagaggaggcaggagacacaatcccacctctcaatgtgcaaatgtggcatttcgaatttgcaataggatgagtaaatttattttctctgagactttaatgagaccatgtgctacaagtacgaagtgttatcagagttgctattatagctgcagcttcaataatgcagaaaaatcagctatgtgccatgagaatttatttcccaagaatacgacaatgatctctgttgttgggaaaggggggattggtccatgtttcctgccatggtaaataactagaagcttggcctgaatggacgccgaaaccgcaggtgtgtactatcaccaaataaaatccctgtcaaactggctttaatttcataggatcagtccccatattttctttaacttctctgccatagcatatatagatgccatttttgttcagttttgtggcttgagcaaataactatcacttttctcgacagtattgagcagaagggggagacagggaagtatgaagtgtgtctgtgaacaggctgtctcatacacacatccagtgagctggaagacacaagggagaaggacgaatccttttcataggaggtgtgtgtcttccaggttgctggcatcatctctgctgcgattgtgatgatcgccattcttgccctggggaagcttctggaacccttgcagaaggtataaccctgcttctctgcataccgattgcataatttcccttcactactctgctaccagataaataacaggagatttaacaatcatcacatggaaaaccattccctgaataacacagccttctctgtctctcttggcagtcggtcttggcagctgttgtaattgccaacctgaaagggatgtttatgcagctgtgtgacattcctcgtctgtggagacagaataagattgatgctgtaagtcacctaccacctatatttatctgaaataagatttggttcttatatgcttcctgccatatcactatattccccccatcccctaagtctcacttgtgctttgggaactccagaggagaaattagaattgtggggataaatcaaagccatgaagtcttccatgtgaactgcattttgtgaagattctgtatctctgggaaggtcaatttccagcaagaatcccatatgaggctcattcatacacctttggccttctaaacacaaaaagcaaaaaaatgtttaaacaccctagtttagaaggacaaacaacatacaaaacaatgcaaaaacaaaatacaaaatgtaaaaacccacgctgactttaactctgactaacataacctttgcaactattctgagaaactaaaaatcagaagctaaatccttcagagttcctctctaatttaaaccataaaaagaatgagaagacttcctacatattgatatggaaaattttccaagacaaatcgttaagtgaaaaagagaccagaatagaaatgctggggaaaagcacagacacaggcagaaataaaagcggatacaaggagggagggaagttgggaatgggtggagaagggggagggttgtgagcaagagttttcccctttttaatgataattcccttatgaaccatacaaatatattagctattcaaaaatttagaaataaataaaatgggacagttggtcttaattgagaagcccagtttctacagctacttaaatataaaatgaatgaagtcacaatatttttaaaaagctgtgatttggccaggcacagtggctcaggcctgtaatcccagcaatttgggaggcaggaggatcacttgagctcaggaatttgagaccagcctgcgtaacacagtgagaccttgtctctactacaaataaaagattaaaaattagccgggtttggtggtatgtacttgtgggtagtcccagctacttgggaggctgaggcgggaggatcacttgaatccagaagatggaggctgcagtgaactatcatggtgccactgcactccagcctgggcaatagagtgtgaccctatctcaaaagaaaaaaaaaaatgtaatttgtttgtggatcattgatcttatttttataggtagttatcacatgatggtacctgatacattaatataattcttttcatttctatttttttccctaggttatctgggtgtttacgtgtatagtgtccatcattctggggctggatctcggtttactagctggccttatatttggactgttgactgtggtcctgagagttcagttgtgagtaacgtaaaacccagatttcctataaacagaacaacacactctgagcttccttataccattttgataaatatagtgaagccactttctttcgttatagttactgtatattgagtgcttctatgcattaagcagacagtgttttacagacatacttaatcttcaaaaatagcctatgaatagttttgattagtctcattctacaggtgagaaaagagaaattcagaaaagctaagaagcatccctaagatcacacagctagtacgtggcagagctaagatttgaacctatgtacctactcatgtcctctactgctgtgctctccttttagttgtggtaagactaaaaagtacatagtttagccaaaggctgaagttgctttgtagtttcttctttaaatgagatgaggaatgtaaggcgctcggccccaggcttgggacaagacagctgttatatattatagttcattttcttttttaaagctagtaaccaaaagttacataacccagaacaggaggactttaaaatagctgatgacagccaaaattcattcaaatctctcatataaccaataaggcatataaccaataaaccacacaattatgtgaaggaaacaattagctcatatgcagagtgaaggcagcaaagacatgatttaaataatggaaaacagcctgtgagggaaggtgaggagcctgaaggtggttttttggttggttttgttttgattctagagaggccttagttaagtgccctcctgggcctagaggggaacagagtctttctctccctcctcaatgtgtccatcgtctttccagacttctggcccctgctctgcctgtgcttgggccgtgaaagaagaagacacctggaaaaacatcaagatagatgtcttcagcttagcatccgctcacctctcctgtcccaccagccagttctccttcctgccctccttccctaccttggcatattggtgcctacccaaaaggcttgtgttttctacctcagcatcctaaatgattgcccaagggcctgagaaggtttgcaggctcccaaagttctcaatttgcttctaggacacgtctcagaaacgctccttagaagatgctgtctctcatgctgtatatgcctcagtgtctattttttcttgtgtggatgtggttggaaaagaagggttttacagagagagattagcttataaacttttaagttaaaaatcagcacaaacctgtaagccaaggaataactggtggcacattttagctgctagtttggtatctaggcttttagccaacaaaaagcagtatcctccacagtatttaatttccagtaattatcatgctgatccagagagcacaatgctgaaagtacactaaacagatactctttcttcaggaattgtatttagcatgtctctagtcacacatgaagagtcacggaatttatctgattgcatcaggaacaagaaatcaatagtctggttgacaggaaggacttatttctggtcctccagtctcctatttctataaaaaatgactaagtcacaaagaagcgccaggcactggaagacccaggggttaaagacagaggctctgctgccctttacctccaggccttttctcacttctcttaagaagtttagttaacaataaaaatcaggataatactgatgacctttcagggttatggcagggcttaaataagatttcacatgcgtgaaagctctatgcttatcctataacgtgttgtgcacgtgcaagtatgatgctcattatttctctcagccatcagaagagaggcacagttctcccctcccctgccgattccacacaaacaccagctgttcatttcagagttagctacaggaaaatgtcatctgcaataaagacagagtccaaaacaccagaatgatgggctctttagtagctgttgtttttaactttttattccaaaatacggctgttccaaaaaatcttgaccttgatattttttcttctagtccttcttggaatggccttggaagcatccctagcacagatatctacaaaagtaccaagaattacaaaaacgtaagtacctttgtgagacatttgctggacttgggtttactagcctgaagtttcagcagctccattttacgtacaaggtagccaaagggagaaaatgcctattgggaaagtctgttagtccacagggagtgtcatgaaaacttttgatccagtgcaccttctgacacccatggcttatgtgaattttgtctatgctagctgaatgtctttttttttttttctttttagatggagtctcactcttcacccaggctggagtgcagaggcaggatctcagctcactgcaacctctgcctcctgggttcaagtgattctcttgtctcagcctccgagtggctgggattacaggcaggtgccaccacgcctggctaatttttgtatttttagtagagatggggttgcaccatgttgcccaggctggtctcaaactcctgagctcaagtgatttgcccgtcttggcctcccaaagagttgggattacaggcgtgagccactgcacctggctagctgaatgtcattttaatataaaactgttgtaagaggaatttaaaaataataggcaatttctagatgttcatccaaaattttgtttatctggtatataattcttatcttctgtaagattttctttattcagttctaacaagagattatcaagttctctatgaccaagaccttattatttgacactttgctttatccttggtattagaagaaataaaatatgacacaggaaatgaaaaacaaagaaattaaacatcccattgatggacttgtgtcacctgcaaataaaattgcttagtggtgactaggggaaacaaagataaaaaagcagagaaagtaaatcaagaaaatacaaatttagcaaataataataataataatatcaaccctaggaagttgtagtctaattttaccttaacattaaaaaaagttggaccttgaaactgggatttcagtagctgctacttaatttatttccgtgatctttctgttatgttgagccaagtgccattaagagctaaaatgatttagagatttttttggctttggggagggagctctaagctgagttagggaattctgacttctaggctccatcttggtgagactttgcccaagtcattcagcctctcaggacctcagttttctcatctgaagcagctagactaaaattgctgattcctgaagactagaaaagtctatgattctgtgattcctgggttctattttgggtgtggccattgtatgtcagggtgagaacagatgatatcataggcctcagttctgcaaatcccattgattttgctttttttctttgctacttttaaagaatgttagcaaaatcaggagggtcagtggtatgaacttcaggcaaatcatggcactgttctaagcctcagtttcttttctggaaatcagagggttgaataaattgctttctaaggccctttctaactttgaccttctatgagactgtagaggtccaagagtttttgtaacctgttgtctccctattcaagaaaagttgtagaggccgggcacggtggttcacacctgtaatcccagcactttgggaggctgaggcgggtgaatcacttgaggtcaggagtttgagaccaacctggccaatgtggcaaaactctgtctctactaaaaatggaaaaattagctgggtgtggtggcagcacctgtaatcccaactacttgggaggctgaggcaggagaatcccttgaacccaggaggtggaggttgcagtgagccgacattgtgccactgtactccagcctgcgcaacagagtgaaactccatctcaaaaaaaaaaaaaaaagaaaagaaagaaaagttgagtgctgctacccagctcctctgagcaactgtgacttgactccttgctaagtagccagaaatgtaattaaatacttgaggcttgaaattatttaatcccagacaatttcttttaatgccagattgaagaacctcaaggagtgaagattcttagattttccagtcctattttctatggcaatgtcgatggttttaaaaaatgtatcaagtccacagtaagtattttatccctagaaatttgttttctaacctcttttgagacttcattcattctacaagtatttactggggtccaatcaggaataggccctagaccctcttccctttgtgtagggcaatgagaattaaaatataacatccttgccttcaaataatttacagtctatttggggattaaaaaaacacatatgttaaaacccaggtagtaataactatgccagacaaaaacattagagatgtttctaggcagaatttgagtaagtttcaaataagtagtatagacagttgagagttcatagaaggaagagatccaggttagttggactaacaggctttgtgcggcagttggctgaaggaaagaaatcatgtcaagtgtttgagaactatgtgagctgagagacagtggaaacatgtattggaggtagggttgcccagttgcagcaaaaagtaaaatatactagtggaataaataagtagaaaatcctggcaccaaatgccatgctatgctttgaacttggagtttgcctctaaatcagtgtttttctaagtgagttccagggcaaactgattcagaggaatgttcacagattttgcaataacaaaagggctctgtgataccaagggaatttggaaaacccagacttaaactaaagagggtattttggggtgtgtgtgtgtttctgttttgtcttttactgtcttggagcctttgatatgctactgtcttctcagagcttctgggtaggagtagggtagcctgggagtagacagagatctactccatcagaccttacaatttcttttttggcaggatagctcaaggaattataccctttgagaaatagcctttccagataacagttgccattaataagctttaggtgccaggcattttaagtaacttgacatttatttccaaaggttggatttgatgccattagagtatataataagaggctgaaagcgctgaggaaaatacagaaactaataaaaagtggacaattaagagcaacaaaggtgagatgacatctttcttttcccccttaaattatttcctttccctgatgagagcagttagagggtctaaaattaaatctatcctctttagtatccagatgtgaatgaacaaatgacatgtacgtatcaaagaacaactgagctattcttataggcaagcgggagtggaagggaatgaaataaaatcagcagcgctgcctggaaacacaggatgtgatttttttccccaccatgaacagtgtctgcattattttctatactttatttttactgaaaggaacaaaataagtgcaaattcaatgccagaaaactacccaccatagaaggcagtctaagtccataaacttttggagctgttaacttttactcagattcttctggccagtgtatttcttggcaaagttccacaatcatccagaaaacaaaagtttcctggctcctctgttctcccagttttcttcctagacaacatcaaagtttgggctgaggtgaaacccatccttaaaaattcatctccttgatgtcttgcttaccaaggaacagtgtgtaggtcttttggataatttgatatgaatggttgaaagatttcaaatctttgacaattaagttgacagtgttttcttcgtttagaatggcatcataagtgatgctgtttcaacaaataatgcttttgagcctgatgaggatattgaagatctggaggaacttgatatcccaaccaaggaaatagagattcaagtggattggaactctgagcttccagtcaaagtgaacgttcccaaagtgccaatccatagccttgtgcttgactgtggagctatatctttcctggacgttgttggagtgagatcactgcgggtggtaaggttctggttttctgaattatacatttggagctttggcaatagtaaaatgatgtgggttgtccagtattgcaacagggcaaatacatgggctttgtaatttttctaggtgaatgcttttgtaaaaaagtgtaatattttaaagcataggctctggagccagactacctgggggagatactggcttcaccacttactagcagtacgaccctgggcaagttgcttaatctgtctatatctcagtttcttcatctgtaatatggaggtaatgatggtatctaccttcacaggttgttacaaggattaaataagctaatagatataaggtgtttagaagagtgtctggttcaggctgggcatggtggctcacgcctgtaatcccagcacttcgggaggctgaggcaggtggatcatgaggtcaggagttcaagaccagcctggccaatatggtgaaaccccgtctctaccaaaaatacaaaaattagctgggcatggtggcgcacacctgtagtcccagctcctaggaggctgtggcaggagaatcgcttgaacccgggaggtggaggttgcagctgagattgtgccactgtactccagcctgggtgacagagtgagacttcatctcaaaaaaaaaaaaaaaaaagaatatctggttcaaagatactccccagcaaattaattcacatttattatgttttatctttctgagaatgtataacaagtggtatatgaaaagaaaaaaatgggcaaaagtttattaagtattacatttctatttgttatgttaacagcaacaggataaggaataccaggtgtatgttaggactggaaaagccaggcattattaagaggttagagtaggaagcaggtcagacatctggaaggtcaaagcaagagttgaggagtatgcaggatagaaacattaatgatatcagaaaccagttatgcaagctgaagttcattaattctgtcaacaaatagatgtgaaatgcctaatgtgtactgagcactctgccaggcacaagagactagtgatgaagtagacacagtttctacctacgtgggacttagcagtctggaggagaaggcaaacattaagtcatcttataaataacaattgtagtaagtgctccaaagaagatgaataggacatcacctgaagcatcaagttcagtgaagcttcaggtaggtatcaaaagggtcaggcagaaaagtaagcaggtcaagacaccaacaatcagatgtaataatataaagctgactcctaactgaggttccacttagctaaggcttctttgctacctctataaggggaggaaatgattccaggatgtgggtactaggtaggtagggtagagaagtgattgtgcttggcaaaagagtatgagaatatgctgacaggttctgttctagttctcttagcagattttgttattagctcatttgaaatcactcttgttctttgttgtacatttcactctaagcattggctgagatccattgtagactatattggccagagagttcaatgaattacttttggggacagtcttaacatatttaatgccagaatatttcccacacaacgaatatttactttcaaatattataatgacagttatgatagctaaagaagactccaaactttatacttgaacagaggtcttgatttgttttcctccataattctcaaattctcttttattattgactatgggtcttgtgtcttgactttttaaaattaaatgtttattttgacataattgtaaattcacatgtagttgtaaggaataatatttagatcctatataccccttacccagtttctcccaatgagtaacatcttgtaaaactgtagcataaaatcacagtaggacactgacattcaaaatagaggccttgacttttaggtcaatagtaacattttgaacccgataagcatagccacacccatatctcttctccaatcagcagggcctatattaagaagcctcctgtactctcttctttccacaaatgcttatttagcacctccacgctatcaagtgctgtgctattgagcgctggatgttgccatctcttgagatataatcctaattataccattactgtagtttgaaaacctccatggttttgcaataataacctttccttaaagtcctgattaaccatgaaagtaataatgtttctcctgagcaagtaactgaatgctactgaattatgggcagataaggttgttaattgttacaaactctccttttttatttttagattgtcaaagaattccaaagaattgatgtgaatgtgtattttgcatcacttcaaggtaaatacatatatctacatatctacctgtaagactttcccgtaagccctttctcctatctgggactgtggtcacattatgtctgaaggccttttttttttttcttttaaagatctcaattgtcattatttgcagttctggaatctggcactgcttcattccataaaacagaataagtgttccaaggaactaagcaggagttcagtattatacacagaaaaggccaaagacagcaaaagcaagcaacaaagagtatattagtccattcaaagttactttcttgtaagtcagagacagtgagacagaacaataggaaaataatggattagttaacatgaggtcatgtcaggatacttttttgtatgaggattattgcagaggaagctttattattatgccaactggaaatttaaactgtcctgttttaggaaatttgctattacctctctctcctgatttcttcaagtatcagataacaatttagtttaggtttgataacttgaaactttagcatgagtgactccattttgatttttagtcttgtctgttgtcgtctagtgcgggagcttagtctaaaacaatggccttttatttttattttttattttactatgtgcctgtgccttgcatgaccccaggatgggcacagctgcttggcccctgagccaccgaaggctgctctactccttcgttctggctactaaaagctgcaaagctctgggagggcaaagctcaagaagactaaaacaatggcctttaccatttttgtttgatgattttccccgttttgatcaggctctcacctaggtaagagtgaacaaaatgtaggagatcagtgctactctgttaccatcattttgggtttctggtctcaggaggtcatgtgtagcttatggtgccctcctcattatcatgtatgtctctgagtttttgttgtttcagagagagaccattcgatgtctgacaggtggctttttggaaacatttaaaactttgagagggtataatgtaccaggaagactgctattatgactatcagggagataataccaagggtttatagtatgctccttagccaggattctcatgaatcaaaccaactaaaattgaatagcctgacaaggagactacctgttttaaccaagaagtcttctctgtagtacctgatgtatttatatatgtggaacaagaagtgtcacccaactgcacagatgcttccttgttgagttagcaggtaatctagcattccatgactggttaaattaaagcagaaagtgtaagttacccaaagaagctactcattgtgaagttttaactacagcactatcctgccaagtgaaagaggtaggcacaagtaagggaaaattaaaagggataagcatcttatgatagggagtcttgttctgacagtcttggagctgtctacagcatgaagttgacaacttcttgttttggtttgtagttttattgtctctagttgtggcatccagcattctggcgaactctctatgtggcccacagtttaagcatgagattcatctcttgaaatttacactgagttgctcagcttcagcttacagagcttcaggaactgagtagttcttggtcttcattggagtgttgtagccagatattagtgaaagctaaaagaattaagaatccagctcagtctacaggtagataataaaaactcataaatattgaacagggctacagtctaagaacagttttactatgcttttcttttgaaccatatgtttttctttctatagtcacctccatttctatcaaagacgatcatggtagaccaatttgtttacaaaataagtttggtctcaaacttggcctgattgattatttacacagtacagcaagaataactacataggtgactcctttcaaatttgctttgccaagcctggcgaggtattgcttgcctgtgagcccagctacttgggaggctgaggtgagaggattgcttgagcccaggaattcaaggctgcagtgcactatgattgtgcctgtgaatagccactgcactatagcctggacaacacagtgagaccatgtctccaaaaaataattgctttgatagaaattttgacaaggaatctcagattggactttttaaaacgtcttgatgctatgaagtcaaaccaaggcagacattaggctttgcctgatgtatctaatatcttgaagttactgggcctcccaggaaggaacgactttttattcactcattgtaaggctagcagcccttgaagccaggaattctgtgcacattttcaaatatgatattctattcaaagccttgataatataaccaatgttttccaattgtattctatttaaaagaacagattctattgaactttcatgtaaataatcatattgccataaaaataagaatactcacaaagagtttccaaattctggaaggatcaggtagagaggaaaagcaaatgtttcaatttttgtttatgaaagtatgcttaacaaggctgggtgcggtggctcacatctgtaatcccagcactttgggaagccaaggcggacaattgctttgagctcagagtttgagaccagcctggcaacatggcaaaacgccgttactacaaaaaatacaaaaaattagctgggcatggagcctgaggctgagaatcacttgagctggggaagtggaggtagcagtgagcccagatggtgccactgcactccaacctgggtgacagagtgagaccctgtctcaaaaaataaaaaaaaagtatgcttaaccaagtggctgtaaactgcagatagctttaaagaaaaattttctttagatctggaaaacaaatattaaaagaaccagcaatgtttcaaataaaaaagccataaaacctgtaattcttctccatcagttcattcagtctcatgtaattaattcttgctctgtttgatcttggctggtagtttaattccaacgaatggtatgaattcaaagttattagaaacctgtatttgtcagagttcttttcattcttcccatataactctttgaagtcacagcactttagaattataatggcttacaaagagctttcagaaaaagtatcagaacaaaacaattaactgtggacaacaagacttaaagtggctatatttaaagatctgatgtgagttacccaattgacaaggatatttggatatttctgtggcacacaacaatttaaaataaccaaaattatgactggtagcatttataccaagacctatcacatttctaggaatgttatataattttggaacatattaataacatatctataaaaatatagcacaaagaaagttaaacatcatttcttattttaacagtgcttcccatataatttaacctatcagataaggccatttggtttaacatctctcttttacagattctttaagaaattccagggtcctctggaacatcccaaagttagttcaaggtcaaaaagacttaattttgatttttgagaagtttgtcaaataccaaaggtttaaaacatttgatcaaaatcggatcataggtcactatgaaataaaaccaaagtgaaaaaagagttcaaaggcaaaaagcacaagaagagttatattgatgaaacatgaaatctctgttttctaggccagttacctggaagagaaaatcctctcacaattttctattaagagtaaaccaatcctctgagaaaactctattgttccaacacataggcccacactttagccttccatcagtgtactttaatattaatgctcaatttttagaaaaacttataaataattcccttctacttttagccaactcaatcacataaaatttttcatgatatttatcttctacaaaccttctacaacttgcttaaaccttcatttggtcctatacttccttttttaaaattggcattgtaccttaggacaaagatttacttttcttttctccttatcattttgaccatataaggttatctcctatacaaaagaaaaaattactctcttttcaattttctttatctcttcatacttgtaaatttcttctcacatctttcctacctagtggttccttcctgccttgttttgatttccttcataagtccatatttagaaacaacctttaaataacctctgattgccaagctagagttaagttttaaataaataaataggccggtcatggcggctcacatctgtaatcccagcactttgggaggcaaaggtcagaggatcacttcaggccaggagtttgagaccagcctgagcaacatggtgagaccccgtctctattattttttttttaaaaaacaaaaagcataaaaactctgagaacattttgaacccagaaagatattacttccaatttgtgccacagagctggtaatgtatggaaatgtgtatcttgacagtgggtgggggtggggtgaatattgacaatggggggatgttgttatgaggagagcaaagctggagattacttagattccttagaacaggaggactctcaagggtgtgagtctctgtgtgtttctttatgaatgtatgtgtgtaggaaagtgctaaggcttaggttgaattctttagcagcagagcccaagatggggattcttgcacaagcgatttattgagaatacatctgaggaaatttatgaagcagtgaggggagcaggatagggaaggggaagaagctgatcaaagacatggtttctgaagtccagcgtagatccctgatttcacagggagcaccaccacaggaagagtaccagaaggttatgcctccttgaggcaagaggacctgctttctcccccagtaatgagtcagtcagtggctgcaggccagccatgtgtggggatgaaacctcccagttctctttatttacttatttatttgagacagggtcttgctctgtcacccaggctggagtgcagtggtgcaactgtggctcactgcagcctcaaactcctgggctcaagtgatcctcccatctcagcctcctgagtagctgagactataggtgcacaaccacacctggctaatttttgtatttttttataaagatggggtttcaccatattgcccagaagttctgggttcaaagtgatctgccctcctcggcctctcaaagtgctggaattacagacccagtcctctttagatgacacagctcccaacgggcaagggaaagtctccagagaagggcacagctgtgaaacattggcagcctggcccacagcagcaggaggatggatacactggcttggccaaagggacgtgatcgtccacaaggttgactacgaccagttatgggataaccattctatatactactggaaaagaaactgtcatttcaaatctgggtcacattttggataagagaaaaataaataaataaaaggaggagctacaaaaacttagtataggttgatgctttaaaatttcttttcttagctgggcatggtagggtgtgccctgtagtcctagctaattgggagggtgaggtggggggatcacttgaacttgggacgcggaggttgcagtgagcaatgatgccactgcactccagcctgggcaatagaatgagactctgtctcaaaaacaaacaaaaatttcttttcctaggaactaacaaaacattgtgtctttcttttgaagattatgtgatagaaaagctggagcaatgcgggttctttgacgacaacattagaaaggacacattctttttgacggtccatgatgctatactctatctacagaaccaagtgaaatctcaagagggtcaaggttccattttagaaacggtaaatattcaacctttctacagatgtatcttttctaaactatcatgatttctataaatggcaaacattacacaagtctagtctagctgttgaattttaagctacctatataacttcatggagcctcagttttttcatcagtaaaatggaagtaaaaacattaaccttgctaggtagatatgaagactaaataagatagtttataggaaattacctggtagtacccagtactgaatagttctacaatgtgtaggtttattaataaaagtgggcattagctataatgccttttaagaatattgaatcttggatcttttgtgatctgggatttgtgtacataaattccacttaaattctcagcaatctggaaaaccttgaattataaatgtctttaaacaggatccaccaggccataagtgatctttgaaaaagaaatttaaaaatcaagccacaaagaagcccagggttaatttttccctacaaaatagaataggccctgatgggaggcctcatggcacaacagtagcgcatctggctccagaataggccctgatttcccatgggtattattttgttaatttttctgtcaaatacccagaagaggtgagcattctggtctggttcattgggcttggcctaatggtgctcctggtggtacaagaatctcatttctcatagtgaatttaggaaactaaagcaaatacctatcaagatataataacagtaatgattccagtgacatcgtggatattttaaattgcttcccatttttctaaaagtagaataagtagatccttattgtagattggcagttgattgaagaaaactaacttaggaaatgatattatattattctttttaggcactggtagtggagagattgttctatttgatgttccttggtaaaatactagtcctaactaccaagctgtggatcttaaatataaaaaaggaaaaaaaaaaaagagtaaagctacaaatctaaagaaaaaaaaactgtttatcattgaaaattcataaactttttctatccaacttaaaattctctaacccataggtgataagaaagttggatcatatgaagtatcctttaagagatccacattaaaagtaaaacagaaccaaggtatcaagttctttctcaacatgaaagcagttattttatttgtttatacccattcttactaagattttaggctatgaatgtcataaaaaccactaaccaagagtgtatctactaggttagactcactcttgtttgcaatcagagaggtattgtgagtggctgggatggatttttttggaccttaaacaaatagactaagcataacggaatgcttgtattacatacttactggtccactaaaagtgggttggacattcctggtggcctgtgagatcaagaggcttatatttctgtgtcttctcagagtctagcacaaagctttatatgtgataagtaggtgaatgatgataaactccttcaagagggagtccctctgtatcaaagatattgtgactgcaatgacacaaccttcttcctatccctttattttaccatcacaggactatctcaggacacaacttgtagttagacttatcctctacctttcccattatgtcataccatttgcacagggacttaaccctctaattcattctcatactagctaagagaattgggctatttgtgagttgaaaagtagctaagtagcatttcaaaatgttattttagcctggatatatatttggagttgctttgaaaatgtccttttccatgcaaaacacaaagccaaaattgtcgttggtttcctctgtgtagaagattaaattacatgccacctctaaacagtagagcttttctgaataaccaacttggtccatagacattggtttccatctccaatagaattaatttccacccaattccatttgtggctgttttttgtcatcagtgacaagctcttcactgtgcattcattgcacactcaacgctgtgctaagtgctcttagcttagccattgagagatgcactattgactgctgaatcatttaggcagagggggtgacttgttaagaggcatacactcaagaggttggggaagagagctgaaaaggagtttacacaatggagaactataccagttcacctttcaatgtgcaaaaaaatgatatacaaaaaattttagttgggaaatataaaagaacaatacagctgaagaggattctgaagtatgtaaagacagatgagaagcaccaggaaagcttcaaatcattttcagtggagcatcaggtgggttgatgctattctatttctaccctgtgttctctttttcaagatcactctcattcaggattgtaaagatacccttgaattaatagaaacagagctgacggaagaagaacttgatgtccaggatgaggtatgatcattttcttctgaagaaaatatttgaattacattttgaataattagagtaatacaaatagtgaatatatctgattaagaactgtcagggaacataattcccccaaatgcagaaaagatggcttcatagcagggaaaaagagaaaataagaattctcccttgaagacattaagtacttggggatcttttgtcccaggcatttggggatgatcagcaactggcaagagccaacacactgctcctgatttgatacctacacctctgcatactgctcttctagagatgtaaggccatggggtaggaaaaaaatgaatagaggaaacttctaagctaggaactttataagcctcaggaatagtatgtgaggaacagaaaccctatgaccttccttcatatgactgataaaggctttaaaaacacactctccccaccctagactgattctgtgtatttcagatgctcttgtgacatcagactattcctaggaaacttgtctgaacttgtagcatctgagtaaattttgcagcttcgccactggataagaggtgaacactgaaggaagatcacagaattgtaaaaagttgaaagatttcttagaatcaagtagtctaacattctagcccatgcagaaatccttcctacaccatccttgatgaatgttcattcagcttttatgtgaacatttccagacattggccactagcggcttctcaagggagtttgttacatggttggaagtctctaaatgttacttgtgcttacagaactcaatttggcctttctgtagtaaccacctagtgaactgagatctgccttccttagcaacacagaccttcccactgaacagcccttcaaatatttgagaatagttctcatgtctccagcagactctcttccagttgagactcttctagttccttctattccttacaaacaagcagtcagtgcttctctggtcacgatggggacacaaaaccctaaatgcggccaggccagcatggagattattcaaccatgacctaccttgatctcatcaagatattcctattactacagcttaaaaatgtgtttcctttcataatagcaacatcagaattttagcttctattgagcaggggccaactaaagactggggcattttcatacaagctatggtctagtagagttccctagttatatttatttaattgagctttgaccctaatacagaactacacctatttctgctggatttcatcttgttggttcttgtttactgacataattttgtattattattagtattattattattattattatttgtgactgagtcttactctgtcacctggactggagtgcagtggtacaatctcagctcactgcaatccctccctcccaggttcaagagattctcacgtgtgcctcagcttcccaagtagttgggattacaggcgctcgccaccacgtccagataattttttttttttgtattcttagtagagacagggttttgccatgttgtccaggctggtcttgaactcctgacctcaagtaatccacctgccttgccctcccagattgctgggattacaggcatgagccaccacattggccagttttgtgttttgaatctaacatccaggatattgtctaccccagtacccgttacctggtgtcataatcaaatctgataagcctgccttctctgcctttttctaggtcttgaaaaaatgttgcaaagaaaacattcaaccccctatagtgaaatcaggcagtaaggatgacaggcagagatttctgtggaggaaatacattgctagagtgaaaatcacagtacctgcatcttggcccaccagcttagtgagcccaggaaagtcattatcgacctgagaagtccttttagctccagtagtttatgactctatggatatagggtgccttagtttgagtaaaaactcatatgtcaacattaaaacttaagactgctatattataggatatttattggttgccacgtaaaataatcattcagggagggtttctatagatggtaaaacaatatagcacaatagtttcaagggcatggactttagaacaagacagacctgggtgctagtcctcattctgctacttactggctgtgcaccccagggcaaattacttatcctgtcttcatattagtatcttcatgtaaagtagtaataataccacagagttgtgaaaattaaaggataaatgtaaagtaacaagagcagtgccttgtacatagtaagtgctcaataaatagtaatcattgctcttaaataaatccaattaaagtgtgatgaatacaggccaggctcagtgactcaagcctgtaatcccagcactttgggaggctgaggcagggggatcacttgaggtcaggagtttgagaccagcctgactaacatggtaaccccccgaccatctctactaaaaaaaaaaaaaaaaaaattagctgggtgtggtggcaggcacctgtaatcccagctactcgggaggctgaggcaggagaattgcttgaacctgggaggcagaggttgcagtgagctgagatcacgccacagcactccagcctgggcaacagtgagtgagattcagtctccaaaaaaaaaaaaaagtataatgaatacgaaatgaagtttttaccctatttctattgtgatgatatacacctaagatgagtagcagtaagcaatcaatactataaaaacatatttataaaaaagataatgcagacttaaggagaattcagttgtatcaacactttgttttccccttgcttccacaggctatgcgtacacttgcatcctgaaagtgggttcgggaggtctctatgagcaaggaatacaagacaaaacttcctcaatgcattgactatttcttcagactcaaaacactcattcttttttctattaagccattgaaagagaagcactaagactgcttctaggctttatttataaaataaacaccttatccctaacatgggcaaaatggctagaattattcagacgatttggcagcgtccagggtaagctggtgttataatacgctgctgatctacatcacagatttgctaataatgttcacgtgggccctggcatatctctgttcagttagagtgagtgctgacccaacagcctctgtggtcaagcgagtcacgaatgattaatcataaagaaaaatcagtttttgactgacctggatatccatgagctgcactgatcaccatgtaaggtcacatttagtaaatgctgaaataaaatgattaatgcatttatcaataaaagcctttgaaaatactttggataataaattggagttttaaaaatgcaaatttgcttagtatctaataatgaagtgttattacatatagccggaattgaggatctctttgatcctggaaatggtttacctaaaagctacagaaccaggccaatatattttgaaatattgatgcagacaaatgaaataataaagagattttcatggtttataaaaatcttttttgatatgataataatcatgatcacaactgagatcaaaaaaatatatgacagattattttgtttaaaaatgcagttttaattatcttagtctatagaaatgatcattgcatggaggcatgtataggtatgatctgtgtaaaatctgacataaaaacagtgctattctgagtgaaaatttttttgatgtgcttacataaccatggtgattaaaatgagtttatattttttctcaaaaattttagcagtgtgtaaagtaagtaatctttaactgaactctgaccacttaaaaaaaaatctaaaaattgaactacctatagtagtctgtgtttaaagtgaatttttaaagacaaagcattctaaatgaactcaatataaaaacattcatttggaatgtacatactgaaaaatacaggtttttttgaccaaaagtttttatatcttttctttttatttatttttttcctaagtgccaacaattttctagatattatatacaacacaggctttgatcttggggacttttcccatatatttcacactggagtgaatgaagttgtacttcatttctagagaaaagttatacccaggtccccaattgagaatgtcttgcttgattgaaaacgacatcatcccttggtatactccagggattggtttcaggacccctgcatttaccaaaatttgtgcacactcaagtcctgcagtcacccctgcctaaagatagaatggcttctctgtttttcttctgaaatacaaccagaaacaatgtgtctatttctgaaagaataggattaatgatcatacaaatgggttaatcctgaattctggttgtaaatctggttacagcataactaggattataatgctgcctcattttcacagcactacttgcttatattgacaacaaatcatctcgctaaagagtgaatgtaggccaggcgcggtggctcatgcctgtaatcccagcactttgggaggccgaggcgggtggatcacgaggtcaggagatcgagaccatcctggctaacatggtaaaaccccgtctctactaaaaatagaaaaaaagaaattagcctagcgtggtggctggcgggcgcctgtagtcccagctatttgggaggctaaggcaggagaatggcgtgaacccgggaggcggagcttgcagtgagccgaggtcgtgccactgcactccagcctgggcgacagagcaagactccgtctcaaaaaaaaaaaaaaaaaaaaaaaaagagtgaatgtaatagtcttgcagaaaatgaatgaatacctttgttcaataaaggaaatatgcactgctcacttttttgaaggaaatgccaaagttacgttttacaacaaggctagagtttgtaaattctgggttcatttgtgatgacataagtcagcaaactgcgggaatactgtctcttctatgtattttgtgaatagtaagcataattttagttttgtattatcaatgaaaatttcacttgaaattaaagctgccttttgttatatttttaacctataggataagattccagtattgtatatgagttttaacaaattaaaaaatcaaatcatgtacatttgaaaatatttgcacacatttaaaaataaatgtaaagttgtcttttaaactactcggatgtgtcctttctgaacaaaa

SEQ ID NO: 8 - protein, 1230 aa, Homo sapiens [sequence omitted]

SEQ ID NO: 9 - protein, 1230 aa, Homo sapiens
MIKTEKSYPERRLRGVLEELSCGCCRFLSLADKDQGHSSRTRLDRERLKSCMRELENMGQQARMLRAQVKRHTVRDKLRLCQNFLQKLRFLADEPQHSIPDIFIWMMSNNKRVAYARVPSKDLLFSIVEEETGKDCAKVKTLFLKLPGKRGFGSAGWTVQAKVELYLWLGLSKQRKEFLCGLPCGFQEVKAAQGLGLHAFPPVSLVYTKKQAFQLRAHMYQARSLFAADSSGLSDPFARVFFINQSQCTEVLNETLCPTWDQMLVFDNLELYGEAHELRDDPPIIVIEIYDQDSMGKADFMGRTFAKPLVKMADEAYCPPRFPPQLEYYQIYRGNATAGDLLAAFELLQIGPAGKADLPPINGPVDVDRGPIMPVPMGIRPVLSKYRVEVLFWGLRDLKRVNLAQVDRPRVDIECAGKGVQSSLIHNYKKNPNFNTLVKWFEVDLPENELLHPPLNIRVVDCRAFGRYTLVGSHAVSSLRRFIYRPPDRSAPSWNTTGEVVVTMEPEVPIKKLETMVKLDATSEAVVKVDVAEEEKEKKKKKKGTAEEPEEEEPDESMLDWWSKYFASIDTMKEQLRQQEPSGIDLEEKEEVDNTEGLKGSMKGKEKARAAKEEKKKKTQSSGSGQGSEAPEKKKPKIDELKVYPKELESEFDNFEDWLHTFNLLRGKTGDDEDGSTEEERIVGRFKGSLCVYKVPLPEDVSREAGYDSTYGMFQGIPSNDPINVLVRVYVVRATDLHPADINGKADPYIAIRLGKTDIRDKENYISKQLNPVFGKSFDIEASFPMESMLTVAVYDWDLVGTDDLIGETKIDLENRFYSKHRATCGIAQTYSTHGYNIWRDPMKPSQILTRLCKDGKVDGPHFGPPGRVKVANRVFTGPSEIEDENGQRKPTDEHVALLALRHWEDIPRAGCRLVPEHVETRPLLNPDKPGIEQGRLELWVDMFPMDMPAPGTPLDISPRKPKKYELRVIIWNTDEVVLEDDDFFTGEKSSDIFVRGWLKGQQEDKQDTDVHYHSLTGEGNFNWRYLFPFDYLAAEEKIVISKKESMFSWDETEYKIPARLTLQIWDADHFSADDFLGAIELDLNRFPRGAKTAKQCTMEMATGEVDVPLVSIFKQKRVKGWWPLLARNENDEFELTGKVEAELHLLTAEEAEKNPVGLARNEPDPLEKPNRPDTAFVWFLNPLKSIKYLICTRYKWLIIKIVLALLGLLMLGLFLYSLPGYMVKKLLGA

SEQ ID NO: 10 - protein, 1307 aa, Homo sapiens
MMTDTQDGPSESSQIMRSLTPLINREEAFGEAGEAGLWPSITHTPDSQEEGLNDIQEMIKTEKSYPERRLRGVLEELSCGCCRFLSLADKDQGHSSRTRLDRERLKSCMRELENMGQQARMLRAQVKRHTVRDKLRLCQNFLQKLRFLADEPQHSIPDIFIWMMSNNKRVAYARVPSKDLLFSIVEEETGKDCAKVKTLFLKLPGKRGFGSAGWTVQAKVELYLWLGLSKQRKEFLCGLPCGFQEVKAAQGLGLHAFPPVSLVYTKKQAFQLRAHMYQARSLFAADSSGLSDPFARVFFINQSQCTEVLNETLCPTWDQMLVFDNLELYGEAHELRDDPPIIVIEIYDQDSMGKADFMGRTFAKPLVKMADEAYCPPRFPPQLEYYQIYRGNATAGDLLAAFELLQIGPAGKADLPPINGPVDVDRGPIMPVPMGIRPVLSKYRVEVLFWGLRDLKRVNLAQVDRPRVDIECAGKGVQSSLIHNYKKNPNFNTLVKWFEVDLPENELLHPPLNIRVVDCRAFGRYTLVGSHAVSSLRRFIYRPPDRSAPSWNTTVRLLRRCRVLCNGGSSSHSTGEVVVTMEPEVPIKKLETMVKLDATSEAVVKVDVAEEEKEKKKKKKGTAEEPEEEEPDESMLDWWSKYFASIDTMKEQLRQQEPSGIDLEEKEEVDNTEGLKGSMKGKEKARAAKEEKKKKTQSSGSGQGSEAPEKKKPKIDELKVYPKELESEFDNFEDWLHTFNLLRGKTGDDEDGSTEEERIVGRFKGSLCVYKVPLPEDVSREAGYDSTYGMFQGIPSNDPINVLVRVYVVRATDLHPADINGKADPYIAIRLGKTDIRDKENYISKQLNPVFGKSFDIEASFPMESMLTVAVYDWDLVGTDDLIGETKIDLENRFYSKHRATCGIAQTYSTHGYNIWRDPMKPSQILTRLCKDGKVDGPHFGPPGRVKVANRVFTGPSEIEDENGQRKPTDEHVALLALRHWEDIPRAGCRLVPEHVETRPLLNPDKPGIEQGRLELWVDMFPMDMPAPGTPLDISPRKPKKYELRVIIWNTDEVVLEDDDFFTGEKSSDIFVRGWLKGQQEDKQDTDVHYHSLTGEGNFNWRYLFPFDYLAAEEKIVISKKESMFSWDETEYKIPARLTLQIWDADHFSADDFLGAIELDLNRFPRGAKTAKQCTMEMATGEVDVPLVSIFKQKRVKGWWPLLARNENDEFELTGKVEAELHLLTAEEAEKNPVGLARNEPDPLEKPNRPDTSFIWFLNPLKSARYFLWHTYRWLLLKLLLLLLLLLLLALFLYSVPGYLVKKILGA

SEQ ID NO: 11 - protein, 1230 aa, Homo sapiens
MIKTEKSYPERRLRGVLEELSCGCCRFLSLADKDQGHSSRTRLDRERLKSCMRELENMGQQARMLRAQVKRHTVRDKLRLCQNFLQKLRFLADEPQHSIPDIFIWMMSNNKRVAYARVPSKDLLFSIVEEETGKDCAKVKTLFLKLPGKRGFGSAGWTVQAKVELYLWLGLSKQRKEFLCGLPCGFQEVKAAQGLGLHAFPPVSLVYTKKQAFQLRAHMYQARSLFAADSSGLSDPFARVFFINQSQCTEVLNETLCPTWDQMLVFDNLELYGEAHELRDDPPIIVIEIYDQDSMGKADFMGRTFAKPLVKMADEAYCPPRFPPQLEYYQIYRGNATAGDLLAAFELLQIGPAGKADLPPINGPVDVDRGPIMPVPMGIRPVLSKYRVEVLFWGLRDLKRVNLAQVDRPRVDIECAGKGVQSSLIHNYKKNPNFNTLVKWFEVDLPENELLHPPLNIRVVDCRAFGRYTLVGSHAVSSLRRFIYRPPDRSAPSWNTTGEVVVTMEPEVPIKKLETMVKLDATSEAVVKVDVAEEEKEKKKKKKGTAEEPEEEEPDESMLDWWSKYFASIDTMKEQLRQQEPSGIDLEEKEEVDNTEGLKGSMKGKEKARAAKEEKKKKTQSSGSGQGSEAPEKKKPKIDELKVYPKELESEFDNFEDWLHTFNLLRGKTGDDEDGSTEEERIVGRFKGSLCVYKVPLPEDVSREAGYDSTYGMFQGIPSNDPINVLVRVYVVRATDLHPADINGKADPYIAIRLGKTDIRDKENYISKQLNPVFGKSFDIEASFPMESMLTVAVYDWDLVGTDDLIGETKIDLENRFYSKHRATCGIAQTYSTHGYNIWRDPMKPSQILTRLCKDGKVDGPHFGPPGRVKVANRVFTGPSEIEDENGQRKPTDEHVALLALRHWEDIPRAGCRLVPEHVETRPLLNPDKPGIEQGRLELWVDMFPMDMPAPGTPLDISPRKPKKYELRVIIWNTDEVVLEDDDFFTGEKSSDIFVRGWLKGQQEDKQDTDVHYHSLTGEGNFNWRYLFPFDYLAAEEKIVISKKESMFSWDETEYKIPARLTLQIWDADHFSADDFLGAIELDLNRFPRGAKTAKQCTMEMATGEVDVPLVSIFKQKRVKGWWPLLARNENDEFELTGKVEAELHLLTAEEAEKNPVGLARNEPDPLEKPNRPDTSFIWFLNPLKSARYFLWHTYRWLLLKLLLLLLLLLLLALFLYSVPGYLVKKILGA

SEQ ID NO: 12 - protein, 1997 aa, Homo sapiens
MALLIHLKTVSELRGRGDRIAKVTFRGQSFYSRVLENCEDVADFDETFRWPVASSIDRNEMLEIQVFNYSKVFSNKLIGTFRMVLQKVVEESHVEVTDTLIDDNNAIIKTSLCVEVRYQATDGTVGSWDDGDFLGDESLQEEEKDSQETDGLLPGSRPSSRPPGEKSFRRAGRSVFSAMKLGKNRSHKEEPQRPDEPAVLEMEDLDHLAIRLGDGLDPDSVSLASVTALTTNVSNKRSKPDIKMEPSAGRPMDYQVSITVIEARQLVGLNMDPVVCVEVGDDKKYTSMKESTNCPYYNEYFVFDFHVSPDVMFDKIIKISVIHSKNLLRSGTLVGSFKMDVGTVYSQPEHQFHHKWAILSDPDDISSGLKGYVKCDVAVVGKGDNIKTPHKANETDEDDIEGNLLLPEGVPPERQWARFYVKIYRAEGLPRMNTSLMANVKKAFIGENKDLVDPYVQVFFAGQKGKTSVQKSSYEPLWNEQVVFTDLFPPLCKRMKVQIRDSDKVNDVAIGTHFIDLRKISNDGDKGFLPTLGPAWVNMYGSTRNYTLLDEHQDLNEGLGEGVSFRARLLLGLAVEIVDTSNPELTSSTEVQVEQATPISESCAGKMEEFFLFGAFLEASMIDRRNGDKPITFEVTIGNYGNEVDGLSRPQRPRPRKEPGDEEEVDLIQNASDDEAGDAGDLASVSSTPPMRPQVTDRNYFHLPYLERKPCIYIKSWWPDQRRRLYNANIMDHIADKLEEGLNDIQEMIKTEKSYPERRLRGVLEELSCGCCRFLSLADKDQGHSSRTRLDRERLKSCMRELENMGQQARMLRAQVKRHTVRDKLRLCQNFLQKLRFLADEPQHSIPDIFIWMMSNNKRVAYARVPSKDLLFSIVEEETGKDCAKVKTLFLKLPGKRGFGSAGWTVQAKVELYLWLGLSKQRKEFLCGLPCGFQEVKAAQGLGLHAFPPVSLVYTKKQAFQLRAHMYQARSLFAADSSGLSDPFARVFFINQSQCTEVLNETLCPTWDQMLVFDNLELYGEAHELRDDPPIIVIEIYDQDSMGKADFMGRTFAKPLVKMADEAYCPPRFPPQLEYYQIYRGNATAGDLLAAFELLQIGPAGKADLPPINGPVDVDRGPIMPVPMGIRPVLSKYRVEVLFWGLRDLKRVNLAQVDRPRVDIECAGKGVQSSLIHNYKKNPNFNTLVKWFEVDLPENELLHPPLNIRVVDCRAFGRYTLVGSHAVSSLRRFIYRPPDRSAPSWNTTVRLLRRCRVLCNGGSSSHSTGEVVVTMEPEVPIKKLETMVKLDATSEAVVKVDVAEEEKEKKKKKKGTAEEPEEEEPDESMLDWWSKYFASIDTMKEQLRQQEPSGIDLEEKEEVDNTEGLKGSMKGKEKARAAKEEKKKKTQSSGSGQGSEAPEKKKPKIDELKVYPKELESEFDNFEDWLHTFNLLRGKTGDDEDGSTEEERIVGRFKGSLCVYKVPLPEDVSREAGYDSTYGMFQGIPSNDPINVLVRVYVVRATDLHPADINGKADPYIAIRLGKTDIRDKENYISKQLNPVFGKSFDIEASFPMESMLTVAVYDWDLVGTDDLIGETKIDLENRFYSKHRATCGIAQTYSTHGYNIWRDPMKPSQILTRLCKDGKVDGPHFGPPGRVKVANRVFTGPSEIEDENGQRKPTDEHVALLALRHWEDIPRAGCRLVPEHVETRPLLNPDKPGIEQGRLELWVDMFPMDMPAPGTPLDISPRKPKKYELRVIIWNTDEVVLEDDDFFTGEKSSDIFVRGWLKGQQEDKQDTDVHYHSLTGEGNFNWRYLFPFDYLAAEEKIVISKKESMFSWDETEYKIPARLTLQIWDADHFSADDFLGAIELDLNRFPRGAKTAKQCTMEMATGEVDVPLVSIFKQKRVKGWWPLLARNENDEFELTGKVEAELHLLTAEEAEKNPVGLARNEPDPLEKPNRPDTAFVWFLNPLKSIKYLICTRYKWLIIKIVLALLGLLMLGLFLYSLPGYMVKKLLGA

SEQ ID NO: 13 - DNA, 3693 bp, Homo sapiens
  source 1..3693: mol_type = other DNA
atgatcaaaacggagaagtcctaccctgagcgtcgcctgcggggcgtcctggaggagctgagctgtggctgctgccgcttcctctccctcgctgacaaggaccagggccactcatcccgcaccaggcttgaccgggagcgcctcaagtcctgcatgagggagctggaaaacatggggcagcaggccaggatgctgcgggcccaggtgaagcggcacacggtgcgggacaagctgaggctgtgccagaacttcctgcagaagctgcgcttcctggcggacgagccccagcacagcattcccgacatcttcatctggatgatgagcaacaacaagcgtgtcgcctatgcccgtgtgccctccaaggacctgctcttctccatcgtggaggaggagactggcaaggactgcgccaaggtcaagacgctcttccttaagctgccagggaagcggggcttcggctcggcaggctggacagtgcaggccaaggtggagctgtacctgtggctgggcctcagcaaacagcgcaaggagttcctgtgcggcctgccctgtggcttccaggaggtcaaggcagcccagggcctgggcctgcatgccttcccacccgtcagcctggtctacaccaagaagcaggcgttccagctccgagcgcacatgtaccaggcccgcagcctctttgccgccgacagcagcggactctcagacccctttgcccgcgtcttcttcatcaatcagagtcagtgcacagaggtgctgaatgagaccctgtgtcccacctgggaccagatgctggtgttcgacaacctggagctctatggtgaagctcatgagctgagggacgatccgcccatcattgtcattgaaatctatgaccaggattccatgggcaaagctgacttcatgggccggaccttcgccaaacccctggtgaagatggcagacgaggcgtactgcccaccccgcttcccacctcagctcgagtactaccagatctaccgtggcaacgccacagctggagacccgctggcggccttcgagctgctgcagattggaccagcagggaaggctgacctgccccccatcaatggcccggtggacgtggaccgaggtcccatcatgcccgtgcccatgggcatccggcccgtgctcagcaagtaccgagtggaggtgctgttctggggcctacgggacctaaagcgggtgaacctggcccaggtggaccggccacgggtggacatcgagtgtgcagggaagggggtgcagtcgtccctgatccacaattataagaagaaccccaacttcaacaccctcgtcaagtggtttgaagtggacctcccagagaacgagctgctgcacccgcccttgaacatccgtgtggtggactgccgggccttcggtcgctacacactggtgggctcccatgccgtcagctccctgcgacgcttcatctaccggcccccagaccgctcggcccccagctggaacaccacgggggaggttgtggtgactatggagccagaggtacccatcaagaaactggagaccatggtgaagctggacgcgacttctgaagctgttgtcaaggtggatgtggctgaggaggagaaggagaagaagaagaagaagaagggcactgcggaggagccagaggaggaggagccagacgagagcatgctggactggtggtccaagtactttgcctccattgacaccatgaaggagcaacttcgacaacaagagccctctggaattgacttggaggagaaggaggaagtggacaataccgagggcctgaaggggtcaatgaagggcaaggagaaggcaagggctgccaaagaggagaagaagaagaaaactcagagctctggctctggccaggggtccgaggcccccgagaagaagaaacccaagattgatgagcttaaggtataccccaaagagctggagtccgagtttgataactttgaggactggctgcacactttcaacttgcttcggggcaagaccggggatgatgaggatggctccaccgaggaggagcgcattgtgggacgcttcaagggctccctctgcgtgtacaaagtgccactcccagaggacgtgtcccgggaagccggctacgactccacctacggcatgttccagggcatcccgagcaatgaccccatcaatgtgctggtccgagtctatgtggtccgggccacggacctgcaccctgctgacatcaacggcaaagctgacccctacatcgccatccggctaggcaagactgacatccgcgacaaggagaactacatctccaagcagctcaaccctgtctttgggaagtcctttgacatcgaggcctccttccccatggaatccatgctgacggtggctgtgtatgactgggacctggtgggcactgatgacctcattggggaaaccaagatcgacctggagaaccgcttctacagcaagcaccgcgccacctgcggcatcgcccagacctactccacacatggctacaatatctggcgggaccccatgaagcccagccagatcctgacccgcctctgcaaagacggcaaagtggacggcccccactttgggccccctgggagagtgaaggtggccaaccgcgtcttcactgggccctctgagattgaggacgagaacggtcagaggaagcccacagacgagcatgtggcgctgttggccctgaggcactgggaggacatcccccgcgcaggctgccgcctggtgccagagcatgtggagacgaggccgctgctcaaccccgacaagccgggcatcgagcagggccgcctggagctgtgggtggacatgttccccatggacatgccagcccctgggacgcctctggacatctcacctcggaagcccaagaagtacgagctgcgggtcatcatctggaacacagatgaggtggtcttggaggacgacgacttcttcacaggggagaagtccagtgacatcttcgtgagggggtggctgaagggccagcaggaggacaagcaggacacagacgtccactaccactccctcactggcgagggcaacttcaactggcgctacctgttccccttcgactacctggcggcggaggagaagatcgtcatctccaagaaggagtccatgttctcctgggacgagaccgagtacaagatccccgcgcggctcaccctgcagatctgggatgcggaccacttctccgctgacgacttcctgggggccatcgagctggacctgaaccggttcccgcggggcgcaaagacagccaagcagtgcaccatggagatggccaccggggaggtggacgtgcccctcgtgtccatcttcaagcaaaagcgcgtcaaaggctggtggcccctcctggcccgcaatgagaacgatgagtttgagctcacgggcaaggtggaggctgagctgcatttactgacagcagaggaggcagagaagaacccagtgggcctggcccgcaatgaacctgaccccctagagaaacccaaccggcccgacacgagcttcatctggttcctgaaccctctcaagtcggctcgctacttcttgtggcacacgtatcgctggctgctcctcaaactgttgctgctcctgctgctgctcctcctcctcgccctgttcctctactctgtgcctggctacctggtcaagaaaatcctcggggcctga

SEQ ID NO: 14 - DNA, 5994 bp, Homo sapiens
  source 1..5994: mol_type = other DNA
atggccttgctcatccacctcaagacagtctcggagctgcggggcaggggcgaccggatcgccaaagtgactttccgagggcaatccttctactctcgggtcctggagaactgtgaggatgtggctgactttgatgagacatttcggtggccggtggccagcagcatcgacagaaatgagatgctggagattcaggttttcaactacagcaaagtcttcagcaacaagctcatcgggaccttccgcatggtgctgcagaaggtggtagaggagagccatgtggaggtgactgacacgctgattgatgacaacaatgctatcatcaagaccagcctgtgcgtggaggtccggtatcaggccactgacggcacagtgggctcctgggacgatggggacttcctgggagatgagtctcttcaagaggaagagaaggacagccaagagacggatggactgctcccaggctcccggcccagctcccggcccccaggagagaagagcttccggagagccgggaggagcgtgttctccgccatgaagctcggcaaaaaccggtctcacaaggaggagccccaaagaccagatgaaccggcggtgctggagatggaagaccttgaccatctggccattcggctaggagatggactggatcccgactcggtgtctctagcctcagtcacagctctcaccactaatgtctccaacaagcgatctaagccagacattaagatggagccaagtgctgggcggcccatggattaccaggtcagcatcacggtgatcgaggcccggcagctggtgggcttgaacatggaccctgtggtgtgcgtggaggtgggtgacgacaagaagtacacatccatgaaggagtccactaactgcccctattacaacgagtacttcgtcttcgacttccatgtctctccggatgtcatgtttgacaagatcatcaagatttcggtgattcactccaagaacctgctgcgcagtggcaccctggtgggctccttcaaaatggacgtgggaaccgtgtactcgcagccagagcaccagttccatcacaagtgggccatcctgtctgaccccgatgacatctcctcggggctgaagggctacgtgaagtgtgacgttgccgtggtgggcaaaggggacaacatcaagacgccccacaaggccaatgagaccgacgaagatgacattgaggggaacttgctgctccccgagggggtgccccccgaacgccagtgggcccggttctatgtgaaaatttaccgagcagaggggctgccccgtatgaacacaagcctcatggccaatgtaaagaaggctttcatcggtgaaaacaaggacctcgtggacccctacgtgcaagtcttctttgctggccagaagggcaagacttcagtgcagaagagcagctatgagcccctgtggaatgagcaggtcgtctttacagacctcttccccccactctgcaaacgcatgaaggtgcagatccgagactcggacaaggtcaacgacgtggccatcggcacccacttcattgacctgcgcaagatttctaatgacggagacaaaggcttcctgcccacactgggcccagcctgggtgaacatgtacggctccacacgtaactacacgctgctggatgagcatcaggacctgaacgagggcctgggggagggtgtgtccttccgggcccggctcctgctgggcctggctgtggagatcgtagacacctccaaccctgagctcaccagctccacagaggtgcaggtggagcaggccacgcccatctcggagagctgtgcaggtaaaatggaagaattctttctctttggagccttcctggaggcctcaatgatcgaccggagaaacggagacaagcccatcacctttgaggtcaccataggcaactatgggaacgaagttgatggcctgtcccggccccagcggcctcggccccggaaggagccgggggatgaggaagaagtagacctgattcagaacgcaagtgatgacgaggccggtgatgccggggacctggcctcagtctcctccactccaccaatgcggccccaggtcaccgacaggaactacttccatctgccctacctggagcgaaagccctgcatctacatcaagagctggtggccggaccagcgccgccgcctctacaatgccaacatcatggaccacattgccgacaagctggaagaaggcctgaacgacatacaggagatgatcaaaacggagaagtcctaccctgagcgtcgcctgcggggcgtcctggaggagctgagctgtggctgctgccgcttcctctccctcgctgacaaggaccagggccactcatcccgcaccaggcttgaccgggagcgcctcaagtcctgcatgagggagctggaaaacatggggcagcaggccaggatgctgcgggcccaggtgaagcggcacacggtgcgggacaagctgaggctgtgccagaacttcctgcagaagctgcgcttcctggcggacgagccccagcacagcattcccgacatcttcatctggatgatgagcaacaacaagcgtgtcgcctatgcccgtgtgccctccaaggacctgctcttctccatcgtggaggaggagactggcaaggactgcgccaaggtcaagacgctcttccttaagctgccagggaagcggggcttcggctcggcaggctggacagtgcaggccaaggtggagctgtacctgtggctgggcctcagcaaacagcgcaaggagttcctgtgcggcctgccctgtggcttccaggaggtcaaggcagcccagggcctgggcctgcatgccttcccacccgtcagcctggtctacaccaagaagcaggcgttccagctccgagcgcacatgtaccaggcccgcagcctctttgccgccgacagcagcggactctcagacccctttgcccgcgtcttcttcatcaatcagagtcagtgcacagaggtgctgaatgagaccctgtgtcccacctgggaccagatgctggtgttcgacaacctggagctctatggtgaagctcatgagctgagggacgatccgcccatcattgtcattgaaatctatgaccaggattccatgggcaaagctgacttcatgggccggaccttcgccaaacccctggtgaagatggcagacgaggcgtactgcccaccccgcttcccacctcagctcgagtactaccagatctaccgtggcaacgccacagctggagacctgctggcggccttcgagctgctgcagattggaccagcagggaaggctgacctgccccccatcaatggcccggtggacgtggaccgaggtcccatcatgcccgtgcccatgggcatccggcccgtgctcagcaagtaccgagtggaggtgctgttctggggcctacgggacctaaagcgggtgaacctggcccaggtggaccggccacgggtggacatcgagtgtgcagggaagggggtgcagtcgtccctgatccacaattataagaagaaccccaacttcaacaccctcgtcaagtggtttgaagtggacctcccagagaacgagctgctgcacccgcccttgaacatccgtgtggtggactgccgggccttcggtcgctacacactggtgggctcccatgccgtcagctccctgcgacgcttcatctaccggcccccagaccgctcggcccccagctggaacaccacggtcaggcttctccggcgctgccgtgtgctgtgcaatgggggctcctcctctcactccacaggggaggttgtggtgactatggagccagaggtacccatcaagaaactggagaccatggtgaagctggacgcgacttctgaagctgttgtcaaggtggatgtggctgaggaggagaaggagaagaagaagaagaagaagggcactgcggaggagccagaggaggaggagccagacgagagcatgctggactggtggtccaagtactttgcctccattgacaccatgaaggagcaacttcgacaacaagagccctctggaattgacttggaggagaaggaggaagtggacaataccgagggcctgaaggggtcaatgaagggcaaggagaaggcaagggctgccaaagaggagaagaagaagaaaactcagagctctggctctggccaggggtccgaggcccccgagaagaagaaacccaagattgatgagcttaaggtataccccaaagagctggagtccgagtttgataactttgaggactggctgcacactttcaacttgcttcggggcaagaccggggatgatgaggatggctccaccgaggaggagcgcattgtgggacgcttcaagggctccctctgcgtgtacaaagtgccactcccagaggacgtgtcccgggaagccggctacgactccacctacggcatgttccagggcatcccgagcaatgaccccatcaatgtgctggtccgagtctatgtggtccgggccacggacctgcaccctgctgacatcaacggcaaagctgacccctacatcgccatccggctaggcaagactgacatccgcgacaaggagaactacatctccaagcagctcaaccctgtctttgggaagtcctttgacatcgaggcctccttccccatggaatccatgctgacggtggctgtgtatgactgggacctggtgggcactgatgacctcattggggaaaccaagatcgacctggagaaccgcttctacagcaagcaccgcgccacctgcggcatcgcccagacctactccacacatggctacaatatctggcgggaccccatgaagcccagccagatcctgacccgcctctgcaaagacggcaaagtggacggcccccactttgggccccctgggagagtgaaggtggccaaccgcgtcttcactgggccctctgagattgaggacgagaacggtcagaggaagcccacagacgagcatgtggcgctgttggccctgaggcactgggaggacatcccccgcgcaggctgccgcctggtgccagagcatgtggagacgaggccgctgctcaaccccgacaagccgggcatcgagcagggccgcctggagctgtgggtggacatgttccccatggacatgccagcccctgggacgcctctggacatctcacctcggaagcccaagaagtacgagctgcgggtcatcatctggaacacagatgaggtggtcttggaggacgacgacttcttcacaggggagaagtccagtgacatcttcgtgagggggtggctgaagggccagcaggaggacaagcaggacacagacgtccactaccactccctcactggcgagggcaacttcaactggcgctacctgttccccttcgactacctggcggcggaggagaagatcgtcatctccaagaaggagtccatgttctcctgggacgagaccgagtacaagatccccgcgcggctcaccctgcagatctgggatgcggaccacttctccgctgacgacttcctgggggccatcgagctggacctgaaccggttcccgcggggcgcaaagacagccaagcagtgcaccatggagatggccaccggggaggtggacgtgcccctcgtgtccatcttcaagcaaaagcgcgtcaaaggctggtggcccctcctggcccgcaatgagaacgatgagtttgagctcacgggcaaggtggaggctgagctgcatttactgacagcagaggaggcagagaagaacccagtgggcctggcccgcaatgaacctgaccccctagagaaacccaaccggcccgacacgagcttcatctggttcctgaaccctctcaagtcggctcgctacttcttgtggcacacgtatcgctggctgctcctcaaactgttgctgctcctgctgctgctcctcctcctcgccctgttcctctactctgtgcctggctacctggtcaagaaaatcctcggggcctga

SEQ ID NO: 15 - DNA, 3693 bp, Homo sapiens
  source 1..3693: mol_type = other DNA
atgatcaaaacggagaagtcctaccctgagcgtcgcctgcggggcgtcctggaggagctgagctgtggctgctgccgcttcctctccctcgctgacaaggaccagggccactcatcccgcaccaggcttgaccgggagcgcctcaagtcctgcatgagggagctggaaaacatggggcagcaggccaggatgctgcgggcccaggtgaagcggcacacggtgcgggacaagctgaggctgtgccagaacttcctgcagaagctgcgcttcctggcggacgagccccagcacagcattcccgacatcttcatctggatgatgagcaacaacaagcgtgtcgcctatgcccgtgtgccctccaaggacctgctcttctccatcgtggaggaggagactggcaaggactgcgccaaggtcaagacgctcttccttaagctgccagggaagcggggcttcggctcggcaggctggacagtgcaggccaaggtggagctgtacctgtggctgggcctcagcaaacagcgcaaggagttcctgtgcggcctgccctgtggcttccaggaggtcaaggcagcccagggcctgggcctgcatgccttcccacccgtcagcctggtctacaccaagaagcaggcgttccagctccgagcgcacatgtaccaggcccgcagcctctttgccgccgacagcagcggactctcagacccctttgcccgcgtcttcttcatcaatcagagtcagtgcacagaggtgctgaatgagaccctgtgtcccacctgggaccagatgctggtgttcgacaacctggagctctatggtgaagctcatgagctgagggacgatccgcccatcattgtcattgaaatctatgaccaggattccatgggcaaagctgacttcatgggccggaccttcgccaaacccctggtgaagatggcagacgaggcgtactgcccaccccgcttcccacctcagctcgagtactaccagatctaccgtggcaacgccacagctggagacctgctggcggccttcgagctgctgcagattggaccagcagggaaggctgacctgccccccatcaatggcccggtggacgtggaccgaggtcccatcatgcccgtgcccatgggcatccggcccgtgctcagcaagtaccgagtggaggtgctgttctggggcctacgggacctaaagcgggtgaacctggcccaggtggaccggccacgggtggacatcgagtgtgcagggaagggggtgcagtcgtccctgatccacaattataagaagaaccccaacttcaacaccctcgtcaagtggtttgaagtggacctcccagagaacgagctgctgcacccgcccttgaacatccgtgtggtggactgccgggccttcggtcgctacacactggtgggctcccatgccgtcagctccctgcgacgcttcatctaccggcccccagaccgctcggcccccagctggaacaccacgggggaggttgtggtgactatggagccagaggtacccatcaagaaactggagaccatggtgaagctggacgcgacttctgaagctgttgtcaaggtggatgtggctgaggaggagaaggagaagaagaagaagaagaagggcactgcggaggagccagaggaggaggagccagacgagagcatgctggactggtggtccaagtactttgcctccattgacaccatgaaggagcaacttcgacaacaagagccctctggaattgacttggaggagaaggaggaagtggacaataccgagggcctgaaggggtcaatgaagggcaaggagaaggcaagggctgccaaagaggagaagaagaagaaaactcagagctctggctctggccaggggtccgaggcccccgagaagaagaaacccaagattgatgagcttaaggtataccccaaagagctggagtccgagtttgataactttgaggactggctgcacactttcaacttgcttcggggcaagaccggggatgatgaggatggctccaccgaggaggagcgcattgtgggacgcttcaagggctccctctgcgtgtacaaagtgccactcccagaggacgtgtcccgggaagccggctacgactccacctacggcatgttccagggcatcccgagcaatgaccccatcaatgtgctggtccgagtctatgtggtccgggccacggacctgcaccctgctgacatcaacggcaaagctgacccctacatcgccatccggctaggcaagactgacatccgcgacaaggagaactacatctccaagcagctcaaccctgtctttgggaagtcctttgacatcgaggcctccttccccatggaatccatgctgacggtggctgtgtatgactgggacctggtgggcactgatgacctcattggggaaaccaagatcgacctggagaaccgcttctacagcaagcaccgcgccacctgcggcatcgcccagacctactccacacatggctacaatatctggcgggaccccatgaagcccagccagatcctgacccgcctctgcaaagacggcaaagtggacggcccccactttgggccccctgggagagtgaaggtggccaaccgcgtcttcactgggccctctgagattgaggacgagaacggtcagaggaagcccacagacgagcatgtggcgctgttggccctgaggcactgggaggacatcccccgcgcaggctgccgcctggtgccagagcatgtggagacgaggccgctgctcaaccccgacaagccgggcatcgagcagggccgcctggagctgtgggtggacatgttccccatggacatgccagcccctgggacgcctctggacatctcacctcggaagcccaagaagtacgagctgcgggtcatcatctggaacacagatgaggtggtcttggaggacgacgacttcttcacaggggagaagtccagtgacatcttcgtgagggggtggctgaagggccagcaggaggacaagcaggacacagacgtccactaccactccctcactggcgagggcaacttcaactggcgctacctgttccccttcgactacctggcggcggaggagaagatcgtcatctccaagaaggagtccatgttctcctgggacgagaccgagtacaagatccccgcgcggctcaccctgcagatctgggatgcggaccacttctccgctgacgacttcctgggggccatcgagctggacctgaaccggttcccgcggggcgcaaagacagccaagcagtgcaccatggagatggccaccggggaggtggacgtgcccctcgtgtccatcttcaagcaaaagcgcgtcaaaggctggtggcccctcctggcccgcaatgagaacgatgagtttgagctcacgggcaaggtggaggctgagctgcatttactgacagcagaggaggcagagaagaacccagtgggcctggcccgcaatgaacctgaccccctagagaaacccaaccggcccgacacgagcttcatctggttcctgaaccctctcaagtcggctcgctacttcttgtggcacacgtatcgctggctgctcctcaaactgttgctgctcctgctgctgctcctcctcctcgccctgttcctctactctgtgcctggctacctggtcaagaaaatcctcggggcctga

SEQ ID NO: 16 - DNA, 3924 bp, Homo sapiens
  source 1..3924: mol_type = other DNA
atgatgaccgatactcaggatggccctagcgagagctcccagatcatgaggtccctcactcccctgatcaacagggaggaggcatttggggaggctggggaggcggggctgtggcccagcatcacccacactcctgattcacaggaagaaggcctgaacgacatacaggagatgatcaaaacggagaagtcctaccctgagcgtcgcctgcggggcgtcctggaggagctgagctgtggctgctgccgcttcctctccctcgctgacaaggaccagggccactcatcccgcaccaggcttgaccgggagcgcctcaagtcctgcatgagggagctggaaaacatggggcagcaggccaggatgctgcgggcccaggtgaagcggcacacggtgcgggacaagctgaggctgtgccagaacttcctgcagaagctgcgcttcctggcggacgagccccagcacagcattcccgacatcttcatctggatgatgagcaacaacaagcgtgtcgcctatgcccgtgtgccctccaaggacctgctcttctccatcgtggaggaggagactggcaaggactgcgccaaggtcaagacgctcttccttaagctgccagggaagcggggcttcggctcggcaggctggacagtgcaggccaaggtggagctgtacctgtggctgggcctcagcaaacagcgcaaggagttcctgtgcggcctgccctgtggcttccaggaggtcaaggcagcccagggcctgggcctgcatgccttcccacccgtcagcctggtctacaccaagaagcaggcgttccagctccgagcgcacatgtaccaggcccgcagcctctttgccgccgacagcagcggactctcagacccctttgcccgcgtcttcttcatcaatcagagtcagtgcacagaggtgctgaatgagaccctgtgtcccacctgggaccagatgctggtgttcgacaacctggagctctatggtgaagctcatgagctgagggacgatccgcccatcattgtcattgaaatctatgaccaggattccatgggcaaagctgacttcatgggccggaccttcgccaaacccctggtgaagatggcagacgaggcgtactgcccaccccgcttcccacctcagctcgagtactaccagatctaccgtggcaacgccacagctggagacctgctggcggccttcgagctgctgcagattggaccagcagggaaggctgacctgccccccatcaatggcccggtggacgtggaccgaggtcccatcatgcccgtgcccatgggcatccggcccgtgctcagcaagtaccgagtggaggtgctgttctggggcctacgggacctaaagcgggtgaacctggcccaggtggaccggccacgggtggacatcgagtgtgcagggaagggggtgcagtcgtccctgatccacaattataagaagaaccccaacttcaacaccctcgtcaagtggtttgaagtggacctcccagagaacgagctgctgcacccgcccttgaacatccgtgtggtggactgccgggccttcggtcgctacacactggtgggctcccatgccgtcagctccctgcgacgcttcatctaccggcccccagaccgctcggcccccagctggaacaccacggtcaggcttctccggcgctgccgtgtgctgtgcaatgggggctcctcctctcactccacaggggaggttgtggtgactatggagccagaggtacccatcaagaaactggagaccatggtgaagctggacgcgacttctgaagctgttgtcaaggtggatgtggctgaggaggagaaggagaagaagaagaagaagaagggcactgcggaggagccagaggaggaggagccagacgagagcatgctggactggtggtccaagtactttgcctccattgacaccatgaaggagcaacttcgacaacaagagccctctggaattgacttggaggagaaggaggaagtggacaataccgagggcctgaaggggtcaatgaagggcaaggagaaggcaagggctgccaaagaggagaagaagaagaaaactcagagctctggctctggccaggggtccgaggcccccgagaagaagaaacccaagattgatgagcttaaggtataccccaaagagctggagtccgagtttgataactttgaggactggctgcacactttcaacttgcttcggggcaagaccggggatgatgaggatggctccaccgaggaggagcgcattgtgggacgcttcaagggctccctctgcgtgtacaaagtgccactcccagaggacgtgtcccgggaagccggctacgactccacctacggcatgttccagggcatcccgagcaatgaccccatcaatgtgctggtccgagtctatgtggtccgggccacggacctgcaccctgctgacatcaacggcaaagctgacccctacatcgccatccggctaggcaagactgacatccgcgacaaggagaactacatctccaagcagctcaaccctgtctttgggaagtcctttgacatcgaggcctccttccccatggaatccatgctgacggtggctgtgtatgactgggacctggtgggcactgatgacctcattggggaaaccaagatcgacctggagaaccgcttctacagcaagcaccgcgccacctgcggcatcgcccagacctactccacacatggctacaatatctggcgggaccccatgaagcccagccagatcctgacccgcctctgcaaagacggcaaagtggacggcccccactttgggccccctgggagagtgaaggtggccaaccgcgtcttcactgggccctctgagattgaggacgagaacggtcagaggaagcccacagacgagcatgtggcgctgttggccctgaggcactgggaggacatcccccgcgcaggctgccgcctggtgccagagcatgtggagacgaggccgctgctcaaccccgacaagccgggcatcgagcagggccgcctggagctgtgggtggacatgttccccatggacatgccagcccctgggacgcctctggacatctcacctcggaagcccaagaagtacgagctgcgggtcatcatctggaacacagatgaggtggtcttggaggacgacgacttcttcacaggggagaagtccagtgacatcttcgtgagggggtggctgaagggccagcaggaggacaagcaggacacagacgtccactaccactccctcactggcgagggcaacttcaactggcgctacctgttccccttcgactacctggcggcggaggagaagatcgtcatctccaagaaggagtccatgttctcctgggacgagaccgagtacaagatccccgcgcggctcaccctgcagatctgggatgcggaccacttctccgctgacgacttcctgggggccatcgagctggacctgaaccggttcccgcggggcgcaaagacagccaagcagtgcaccatggagatggccaccggggaggtggacgtgcccctcgtgtccatcttcaagcaaaagcgcgtcaaaggctggtggcccctcctggcccgcaatgagaacgatgagtttgagctcacgggcaaggtggaggctgagctgcatttactgacagcagaggaggcagagaagaacccagtgggcctggcccgcaatgaacctgaccccctagagaaacccaaccggcccgacacgagcttcatctggttcctgaaccctctcaagtcggctcgctacttcttgtggcacacgtatcgctggctgctcctcaaactgttgctgctcctgctgctgctcctcctcctcgccctgttcctctactctgtgcctggctacctggtcaagaaaatcctcggggcctga

SEQ ID NO: 17 - DNA, 3453 bp, Homo sapiens
  source 1..3453: mol_type = other DNA
atgatcaaaacggagaagtcctaccctgagcgtcgcctgcggggcgtcctggaggagctgagctgtggctgctgccgcttcctctccctcgctgacaaggaccagggccactcatcccgcaccaggcttgaccgggagcgcctcaagtcctgcatgagggagctggaaaacatggggcagcaggccaggatgctgcgggcccaggtgaagcggcacacggtgcgggacaagctgaggctgtgccagaacttcctgcagaagctgcgcttcctggcggacgagccccagcacagcattcccgacatcttcatctggatgatgagcaacaacaagcgtgtcgcctatgcccgtgtgccctccaaggacctgctcttctccatcgtggaggaggagactggcaaggactgcgccaaggtcaagacgctcttccttaagctgccagggaagcggggcttcggctcggcaggctggacagtgcaggccaaggtggagctgtacctgtggctgggcctcagcaaacagcgcaaggagttcctgtgcggcctgccctgtggcttccaggaggtcaaggcagcccagggcctgggcctgcatgccttcccacccgtcagcctggtctacaccaagaagcaggcgttccagctccgagcgcacatgtaccaggcccgcagcctctttgccgccgacagcagcggactctcagacccctttgcccgcgtcttcttcatcaatcagagtcagtgcacagaggtgctgaatgagaccctgtgtcccacctgggaccagatgctggtgttcgacaacctggagctctatggtgaagctcatgagctgagggacgatccgcccatcattgtcattgaaatctatgaccaggattccatgggcaaagctgacttcatgggccggaccttcgccaaacccctggtgaagatggcagacgaggcgtactgcccaccccgcttcccacctcagctcgagtactaccagatctaccgtggcaacgccacagctggagacctgctggcggccttcgagctgctgcagattggaccagcagggaaggctgacctgccccccatcaatggcccggtggacgtggaccgaggtcccatcatgcccgtgcccatgggcatccggcccgtgctcagcaagtaccgagtggaggtgctgttctggggcctacgggacctaaagcgggtgaacctggcccaggtggaccggccacgggtggacatcgagtgtgcagggaagggggtgcagtcgtccctgatccacaattataagaagaaccccaacttcaacaccctcgtcaagtggtttgaagtggacctcccagagaacgagctgctgcacccgcccttgaacatccgtgtggtggactgccgggccttcggtcgctacacactggtgggctcccatgccgtcagctccctgcgacgcttcatctaccggcccccagaccgctcggcccccagctggaacaccacgggggaggttgtggtgactatggagccagaggtacccatcaagaaactggagaccatggtgaagctggacgcgacttctgaagctgttgtcaaggtggatgtggctgaggaggagaaggagaagaagaagaagaagaagggcactgcggaggagccagaggaggaggagccagacgagagcatgctggactggtggtccaagtactttgcctccattgacaccatgaaggagcaacttcgacaacaagagccctctggaattgacttggaggagaaggaggaagtggacaataccgagggcctgaaggggtcaatgaagggcaaggagaaggcaagggctgccaaagaggagaagaagaagaaaactcagagctctggctctggccaggggtccgaggcccccgagaagaagaaacccaagattgatgagcttaaggtataccccaaagagctggagtccgagtttgataactttgaggactggctgcacactttcaacttgcttcggggcaagaccggggatgatgaggatggctccaccgaggaggagcgcattgtgggacgcttcaagggctccctctgcgtgtacaaagtgccactcccagaggacgtgtcccgggaagccggctacgactccacctacggcatgttccagggcatcccgagcaatgaccccatcaatgtgctggtccgagtctatgtggtccgggccacggacctgcaccctgctgacatcaacggcaaagctgacccctacatcgccatccggctaggcaagactgacatccgcgacaaggagaactacatctccaagcagctcaaccctgtctttgggaagtcctttgacatcgaggcctccttccccatggaatccatgctgacggtggctgtgtatgactgggacctggtgggcactgatgacctcattggggaaaccaagatcgacctggagaaccgcttctacagcaagcaccgcgccacctgcggcatcgcccagacctactccacacatggctacaatatctggcgggaccccatgaagcccagccagatcctgacccgcctctgcaaagacggcaaagtggacggcccccactttgggccccctgggagagtgaaggtggccaaccgcgtcttcactgggccctctgagattgaggacgagaacggtcagaggaagcccacagacgagcatgtggcgctgttggccctgaggcactgggaggacatcccccgcgcaggctgccgcctggtgccagagcatgtggagacgaggccgctgctcaaccccgacaagccgggcatcgagcagggccgcctggagctgtgggtggacatgttccccatggacatgccagcccctgggacgcctctggacatctcacctcggaagcccaagaagtacgagctgcgggtcatcatctggaacacagatgaggtggtcttggaggacgacgacttcttcacaggggagaagtccagtgacatcttcgtgagggggtggctgaagggccagcaggaggacaagcaggacacagacgtccactaccactccctcactggcgagggcaacttcaactggcgctacctgttccccttcgactacctggcggcggaggagaagatcgtcatctccaagaaggacctggcccgcaatgagaacgatgagtttgagctcacgggcaaggtggaggctgagctgcatttactgacagcagaggaggcagagaagaacccagtgggcctggcccgcaatgaacctgaccccctagagaaacccaaccggcccgacacggccttcgtctggttcctcaaccctctcaagtccatcaagtacctcatctgcacccggtacaagtggctcatcatcaagatcgtgctggcgctgttggggctgctcatgttggggctcttcctctacagcctccctggctacatggtcaaaaagctccttggggcatga

SEQ ID NO: 18 - DNA, 5994 bp, Homo sapiens
  source 1..5994: mol_type = other DNA
atggccttgctcatccacctcaagacagtctcggagctgcggggcaggggcgaccggatcgccaaagtgactttccgagggcaatccttctactctcgggtcctggagaactgtgaggatgtggctgactttgatgagacatttcggtggccggtggccagcagcatcgacagaaatgagatgctggagattcaggttttcaactacagcaaagtcttcagcaacaagctcatcgggaccttccgcatggtgctgcagaaggtggtagaggagagccatgtggaggtgactgacacgctgattgatgacaacaatgctatcatcaagaccagcctgtgcgtggaggtccggtatcaggccactgacggcacagtgggctcctgggacgatggggacttcctgggagatgagtctcttcaagaggaagagaaggacagccaagagacggatggactgctcccaggctcccggcccagctcccggcccccaggagagaagagcttccggagagccgggaggagcgtgttctccgccatgaagctcggcaaaaaccggtctcacaaggaggagccccaaagaccagatgaaccggcggtgctggagatggaagaccttgaccatctggccattcggctaggagatggactggatcccgactcggtgtctctagcctcagtcacagctctcaccactaatgtctccaacaagcgatctaagccagacattaagatggagccaagtgctgggcggcccatggattaccaggtcagcatcacggtgatcgaggcccggcagctggtgggcttgaacatggaccctgtggtgtgcgtggaggtgggtgacgacaagaagtacacatccatgaaggagtccactaactgcccctattacaacgagtacttcgtcttcgacttccatgtctctccggatgtcatgtttgacaagatcatcaagatttcggtgattcactccaagaacctgctgcgcagtggcaccctggtgggctccttcaaaatggacgtgggaaccgtgtactcgcagccagagcaccagttccatcacaagtgggccatcctgtctgaccccgatgacatctcctcggggctgaagggctacgtgaagtgtgacgttgccgtggtgggcaaaggggacaacatcaagacgccccacaaggccaatgagaccgacgaagatgacattgaggggaacttgctgctccccgagggggtgccccccgaacgccagtgggcccggttctatgtgaaaatttaccgagcagaggggctgccccgtatgaacacaagcctcatggccaatgtaaagaaggctttcatcggtgaaaacaaggacctcgtggacccctacgtgcaagtcttctttgctggccagaagggcaagacttcagtgcagaagagcagctatgagcccctgtggaatgagcaggtcgtctttacagacctcttccccccactctgcaaacgcatgaaggtgcagatccgagactcggacaaggtcaacgacgtggccatcggcacccacttcattgacctgcgcaagatttctaatgacggagacaaaggcttcctgcccacactgggcccagcctgggtgaacatgtacggctccacacgtaactacacgctgctggatgagcatcaggacctgaacgagggcctgggggagggtgtgtccttccgggcccggctcctgctgggcctggctgtggagatcgtagacacctccaaccctgagctcaccagctccacagaggtgcaggtggagcaggccacgcccatctcggagagctgtgcaggtaaaatggaagaattctttctctttggagccttcctggaggcctcaatgatcgaccggagaaacggagacaagcccatcacctttgaggtcaccataggcaactatgggaacgaagttgatggcctgtcccggccccagcggcctcggccccggaaggagccgggggatgaggaagaagtagacctgattcagaacgcaagtgatgacgaggccggtgatgccggggacctggcctcagtctcctccactccaccaatgcggccccaggtcaccgacaggaactacttccatctgccctacctggagcgaaagccctgcatctacatcaagagctggtggccggaccagcgccgccgcctctacaatgccaacatcatggaccacattgccgacaagctggaagaaggcctgaacgacatacaggagatgatcaaaacggagaagtcctaccctgagcgtcgcctgcggggcgtcctggaggagctgagctgtggctgctgccgcttcctctccctcgctgacaaggaccagggccactcatcccgcaccaggcttgaccgggagcgcctcaagtcctgcatgagggagctggaaaacatggggcagcaggccaggatgctgcgggcccaggtgaagcggcacacggtgcgggacaagctgaggctgtgccagaacttcctgcagaagctgcgcttcctggcggacgagccccagcacagcattcccgacatcttcatctggatgatgagcaacaacaagcgtgtcgcctatgcccgtgtgccctccaaggacctgctcttctccatcgtggaggaggagactggcaaggactgcgccaaggtcaagacgctcttccttaagctgccagggaagcggggcttcggctcggcaggctggacagtgcaggccaaggtggagctgtacctgtggctgggcctcagcaaacagcgcaaggagttcctgtgcggcctgccctgtggcttccaggaggtcaaggcagcccagggcctgggcctgcatgccttcccacccgtcagcctggtctacaccaagaagcaggcgttccagctccgagcgcacatgtaccaggcccgcagcctctttgccgccgacagcagcggactctcagacccctttgcccgcgtcttcttcatcaatcagagtcagtgcacagaggtgctgaatgagaccctgtgtcccacctgggaccagatgctggtgttcgacaacctggagctctatggtgaagctcatgagctgagggacgatccgcccatcattgtcattgaaatctatgaccaggattccatgggcaaagctgacttcatgggccggaccttcgccaaacccctggtgaagatggcagacgaggcgtactgcccaccccgcttcccacctcagctcgagtactaccagatctaccgtggcaacgccacagctggagacctgctggcggccttcgagctgctgcagattggaccagcagggaaggctgacctgccccccatcaatggcccggtggacgtggaccgaggtcccatcatgcccgtgcccatgggcatccggcccgtgctcagcaagtaccgagtggaggtgctgttctggggcctacgggacctaaagcgggtgaacctggcccaggtggaccggccacgggtggacatcgagtgtgcagggaagggggtgcagtcgtccctgatccacaattataagaagaaccccaacttcaacaccctcgtcaagtggtttgaagtggacctcccagagaacgagctgctgcacccgcccttgaacatccgtgtggtggactgccgggccttcggtcgctacacactggtgggctcccatgccgtcagctccctgcgacgcttcatctaccggcccccagaccgctcggcccccagctggaacaccacggtcaggcttctccggcgctgccgtgtgctgtgcaatgggggctcctcctctcactccacaggggaggttgtggtgactatggagccagaggtacccatcaagaaactggagaccatggtgaagctggacgcgacttctgaagctgttgtcaaggtggatgtggctgaggaggagaaggagaagaagaagaagaagaagggcactgcggaggagccagaggaggaggagccagacgagagcatgctggactggtggtccaagtactttgcctccattgacaccatgaaggagcaacttcgacaacaagagccctctggaattgacttggaggagaaggaggaagtggacaataccgagggcctgaaggggtcaatgaagggcaaggagaaggcaagggctgccaaagaggagaagaagaagaaaactcagagctctggctctggccaggggtccgaggcccccgagaagaagaaacccaagattgatgagcttaaggtataccccaaagagctggagtccgagtttgataactttgaggactggctgcacactttcaacttgcttcggggcaagaccggggatgatgaggatggctccaccgaggaggagcgcattgtgggacgcttcaagggctccctctgcgtgtacaaagtgccactcccagaggacgtgtcccgggaagccggctacgactccacctacggcatgttccagggcatcccgagcaatgaccccatcaatgtgctggtccgagtctatgtggtccgggccacggacctgcaccctgctgacatcaacggcaaagctgacccctacatcgccatccggctaggcaagactgacatccgcgacaaggagaactacatctccaagcagctcaaccctgtctttgggaagtcctttgacatcgaggcctccttccccatggaatccatgctgacggtggctgtgtatgactgggacctggtgggcactgatgacctcattggggaaaccaagatcgacctggagaaccgcttctacagcaagcaccgcgccacctgcggcatcgcccagacctactccacacatggctacaatatctggcgggaccccatgaagcccagccagatcctgacccgcctctgcaaagacggcaaagtggacggcccccactttgggccccctgggagagtgaaggtggccaaccgcgtcttcactgggccctctgagattgaggacgagaacggtcagaggaagcccacagacgagcatgtggcgctgttggccctgaggcactgggaggacatcccccgcgcaggctgccgcctggtgccagagcatgtggagacgaggccgctgctcaaccccgacaagccgggcatcgagcagggccgcctggagctgtgggtggacatgttccccatggacatgccagcccctgggacgcctctggacatctcacctcggaagcccaagaagtacgagctgcgggtcatcatctggaacacagatgaggtggtcttggaggacgacgacttcttcacaggggagaagtccagtgacatcttcgtgagggggtggctgaagggccagcaggaggacaagcaggacacagacgtccactaccactccctcactggcgagggcaacttcaactggcgctacctgttccccttcgactacctggcggcggaggagaagatcgtcatctccaagaaggagtccatgttctcctgggacgagaccgagtacaagatccccgcgcggctcaccctgcagatctgggatgcggaccacttctccgctgacgacttcctgggggccatcgagctggacctgaaccggttcccgcggggcgcaaagacagccaagcagtgcaccatggagatggccaccggggaggtggacgtgcccctcgtgtccatcttcaagcaaaagcgcgtcaaaggctggtggcccctcctggcccgcaatgagaacgatgagtttgagctcacgggcaaggtggaggctgagctgcatttactgacagcagaggaggcagagaagaacccagtgggcctggcccgcaatgaacctgaccccctagagaaacccaaccggcccgacacggccttcgtctggttcctcaaccctctcaagtccatcaagtacctcatctgcacccggtacaagtggctcatcatcaagatcgtgctggcgctgttggggctgctcatgttggggctcttcctctacagcctccctggctacatggtcaaaaagctccttggggcatga

SEQ ID NO: 19 - DNA, 108496 bp, Homo sapiens
  source 1..108496: mol_type = other DNA
gggagagcatgcgggctttttcacccatttggagactctgcctgcagaatcctcaagacattcatttcattcattcgttcactctttttttcagacaagggttcttaggatcattcattcattctatacagatttgctgatactgtacaggttgcctctcagaatccagtgcctgttctcagtacctatgctgactggtaggagggataaagacagccttacaccctgggagaggcggtccagagtagaaacatcagacactgtaggagaaagagccaaagaacaggaggcaacagccagacttgcatgttagatggttggagtctgaaaatatccagagtaaagaaaggtaggtgtaacctagtatttgaaagtgctaaacagcaagccagcgctcagggcaagtggccaggaagctttccaagaaaaacttctgggaggataaagggaggtctgtgaaaggaccgaccgcaaagtcgggcgggtactgcacacatgacccattaactacggctcttccggccttgccaggttcttcgagcgggcacccacccggtatccttccctccttcaaccaacaagtactgaccttgcccgaatgctgggtgctggccctgtgcgccggacggaagggcctgattttctcgcattttctctaagcgctggaggctgcccgcctggggcgtctccaagcactaaaccccacgtggctccatctcctcccccttccccggctacatccatgcgaggtcccttatgccctgctggctgtgccccacttgccagggagcgccttcctgtgaaggggaatctggggaggcccccgcccgtgcctgcccacttcctactctgaaaccacaaacctctaggaaggcccctcgccccgtcgggtggaaaattggctcctcggggttccttcaaccccaaagtccgggggcagggggctgaatttcgatcaccgaggagggcgctagtggaagggggaggggaggaggcgctccctcggccttacccgggcatgagtccagggggcacgtaggcggcattgaactcggtcagtagggtgcccgcgctgcgggaggccatggtgggtgcgcgagtacagcgagcctggcgctccgctccgccccacggtaaacagcggcgggtcacctggcaacggccacggcggcgagcctggcaacgccagctggccccgcggtcctcgcgttccgagacactgcgcccccctggcggccacctcccggagcagccccatagggcgcgcccagaaggcgcctcccatttccgcgagctctgctgggtgacccctgtcacttgccccggcgcgtcggggctctctgccttgctgcctgcgggatgtgcagaggctcagatgcgggagggaggcagaacatcgctggagaggcctggcgggatccgtcttgcggtgacccggcttggaacgcgacgctaccacaaaggacaggccaggtcctgactttggaggtcacgcacgaagcagctgccccaccgtggctcaggcccagaaacctgagtggccttagggtccccaggagctatgtctctccaaggcttcccctgcaccccagctccatgggagttccaggaaggggctctgtagtgggccgcgctgggcgaggttgcctaggacgctgtgtgtaattgtgtgtgtgcgtgcgtgcgtgcatgtgtgcgtgtgtgtgtgcgcgccttgcgaagaggagcatttttcatttttcttcttaatctctagctgatggcttccttctcacctcatcatacctgtaaactactccacaagaggcaaaaagaaaatcatagaacgtctgggtgtgtgatttacatttgtccccaatgctgccgttcattttggggatggcatccgcaggggtagcgcttgccccagagagcaggcctgctgaaggcccaccccctgtgtaatcctccctgtgactgcttcagcctccacatttgagtttctccagggacccttacaccagccttggtgcctagggcaggcacagggccttcggcttttccataaggggtgagggtatggggacagcttccacggtgccaggctcttggtgactcgggtggaggccctgccaccccagctccctctgcagcagtcctggtgtcatgaagaagcctggcagttcccactttgtctccaggtcttgcttcttcccttcagatgccggatggagagcagtgctcccctcgcacttcggttctgtaaatggcagtggatgaagaccgcagacgctactgggttcacagaatgtggctgccaccagcattctccaaagacttcccctggcaaatgccaatgaaatgaaggggagccacaggcttcccagaggctcaggaagcagaaacactgaggcctggttggaaagagagctgtaggcaaaggaacggctgcaaacaaactgggtggaaggaaaatccatccatccttcagaatgcagtcatgtctgtatttttctaaattctcattggggaacatgttctacaataaggaaaacatgagtcaaagacccccagccctggtgaggttgaccgcctacttcctcccccattcagggctgcccagccagtcctgctggtaaacccaccaccctgccttccacctgcctgtgttctagtccatctgtctcgtctgattgggatcctgtgccatccatatcatattcatccctgaatctcagcacctggctctggaaagaattcagtaaatgttcattacataaattatatactcagttaccaaaatgggtaacagaagaatggaaattaaaaagtgggttctggctgggaacggtggctcatgcctgtaatcccagcattttggaaggccgaggcaggcggatcacttgaggtcagcagtttgagaccagcctagccaacatggtgaaaccccatctctactaaaaatacaaacattagctgggcatggtagcacatgcttatagtctgacctatttgggaggctgaggcaggagaatcgcttgaacccgggaggcagaggttgcagtgagcctagatcactccactgccctccagcctgggtgacagagtgagactctctctcaaaaaaaaaaaaaaaaaaagagtgggatctgtctcttaggttttcagaaaggccagctgactccattgagagctgctgagtggaattgctaccattttatggatgtggaaagtgagattcagcatagatcaatgccttggctagggcaggatcatgggctttttcctaaagatgcacagggtctataagaggcctcatgaaattcactcctttcaggggaggacctccagagaaccaaggaagaagatattttctgttgttgttgttgtaccttgtagtcaccaagccttaaaaacacagatcacctgatgacctcatggatggaaaatgctagtgaatttaggtgtttttttttttaagacattaaacttatctagcttttgaaaatttagcattcatacttgtattcaataaacagaatactctaagacatttttaaattcaatatgattagataaatgtgagaaaggtaagcaagaattggttaggaaaaagtgcaaaggaaaaaaacgtaagtagaaaaagaaaaatagggcacagtagcaaggaaatatctagaaggaggaaagaaggctcttgggacatactgtaggttatttggaatgcagaattcaaaagaagtaacctcttgttaccatgctgtgaaaaattagtatttctctttttaacctttagactctgtttcaggtagatccctgagctcactcttttatcctttcaacagtaattgggcatcctacggtgcacaggataccatgtggggctctggggtagagggatgctgtgctccagggccctcctgaggtcaggaggggaaaaggcaagggaagcagccccaggactcagtaagatgagaggaggcaggagcagcacagaggaggaccccaacccagctggggtgcgggtacagaggcacctccaggagcaggcactcaagctgagtccagggtggggtggagggcattccaccaagaatgaatagcaagaacaaggctgcagatgaccctgcacagattccagcatcagggattctggcccccagcgtccctttccttggtgtatgctgctggaagacaggagggggcagttctcttttggtccttagaaatttccctatagacatcccttctcctgcccctagcagcttataacagcagaaggccattcaattctgctcctctggctggaaagcaaacatcagcctggcttaccttcgctagcctgcctgacccccagccttggggtggggctaggttagtgccctggatccttaaacatggcccctggtagcacataagcctctgctgcctccacaaccagccatctccatcatgcatggcctggtcctgagcctcccctcaggcagcagccccagcctctctgcttcctgagattcagaaacagggatcccagggcagggctcagggcccagcctcttgggggcacagtctccagcagggaagaggtgggcgtaggtggacaaatacattcccttcttcttgtagtgtgcccctgtgggtgggagtgccccccgccccacatccaccctacctatgctcatgcccactcctctgtgcccactactggtggcagggcttgcttagcagggaagcagcagagccctgcagaggggtgggcagagcctcccttccaggagctgggagaagacacctgaagctggacagagctttatctgggagccggcggctgctgaataatgaattccaactctgccgcactcccaggctgcacattgggtgcacacacacacacacacacacgcacacaccgatacacacacgctgggctgacaacttggaggggcgggggctgtgaggctctgtgagtcgctgcaggagcagcttagctcggcttggttgccttggtctctgtgggcagcatcggaggggggtcgggaggaggaggaggaggcagcggcagagaagagagaggcgtgtgagccgtgctccaccggctagctccttcccgctgctcctgcctggcagtgccaggcagcccacaccagcatggccttgctcatccacctcaagacagtctcggagctgcggggcaggggcgaccggatcgccaaagtgactttccgaggtagggaagccgctgtctcagagggacgccagctctgagagctggaccagcccatgctctggaggtggccggggataggacagggctgggaggatgggtgggaaaagttctagcaggggctggggcgacgagccttttcacaggtagtcatctgcctgggactgactggccattgtgatttctggaaaatcagggtcccctgttcttccatgcctgtgtctccttgtgcttgccaacatgccagttccccgggcagggcacagagccctctgcctggggaggcagaagtgaggaccacatccctgagctcagggagacccaggaccccctccttctctctctctccctctcctgcaggttgatttccttgagcacagggtgggggccgggtatggagcctggggcacccagggtgactgggagaaaccaggcagccagtagctccctgggccccagagtgatgggggacactgttggcttcttttagatctattcatgggcgggaaccccgggagcccctcgcctctcttctgtctggtcttttctcatccttttcactcctgtattcagcgaccatttattatgatctactgtgtcccaaggataggggtagaaacacagagctgagcacaacccagccccagccccaaggagcctgcatctgttgggcaggcgtggaacaagcaggacaggtatgtgagacagaaggtgggggtgcagcatgcaagctacagaagcagcaccctcacccaggctggtgaccggtggtcagggaaggcttcccggaggaagtaacactcagctaatacccgaaggaccagcgggtgggagctaggagaggaggtaaggactgaggaggcagaggaaacagtgtgcccagagctgagagaggagctgaaactctggaactgaaagaggttccatgtgtctacagctcagagagggtgcaggagcggaggccagagagccaagcagggcaaggaggcgaggctggacctgaccccggggacagcggagcccctgagcattttaagtggggaaaggcagggccaggctgactctgtccttcaccacccacctctgcctctccatgtggttgctgcccagccctgagggttgggggtacttctcactagacatggccccttctcccgagagaggggtctgagagtgggatggggacgaggtggtgagaagggggcagagaggacccccctatactaaagagcaaagtgagccttggggcccaggctggacacagtgtctgcacctctgttggaagggatgggagagaccattggcagaacattccagcaagagccctggggcacccacatcacctacccagaggccctgggatgcccacattgcagcttgtgttcatagggacaggcaggggtggaggtgatggcagtggccctgccggcaggcggaggttaggcaggagggagagggaggtgtgggctgggctgccttttgcctcccaccccaacccactgactgctttctctgcagcaccctggatctccctctgtgtgccacctgcaggctcatgctggctttagaaaaagcaaatgtgtcctttcatctgtgaaatgtggccctgagctccacgggcagcatagtgtggggcggttaagctacaggttgccatcctgctgcagctgtgctggaacggtccaggctgcaccggacaggcccacttgcaggccgagaaaccaaggttcaggggtagaacactgcgcgtggcattcacggaggagctgaggcacggtggtcccagctctcaggacctcatcctgagtactcaatcttgcaagctctttatctgctcctgggccacctgggggccagcaccttgtctgacacccatcttctccttggagcagtgaagggctgggcctttagcctcactgaccacacaggaattagtttatttgcaacccttgctctctggactgagtggagaaatcgcttccaagctccacattggcaggaggtggccatgggcagagctcctggggaagggggctgggcagcaggaataggcagatgacaagcagtttccagaaagtacctttattacaacgaaagatgcctcagccgctcacctgtgtcatctagcagttcacagttgtaggcgccccaaaagaccaacactgaccacaattcagagggaatggacccgctctacaatgttccttagcatctcccagcacatgcaaccactgggggccaagcaagtcctctgcagggggaaacaagaaactggtaaacacgcagagggagacactggccccaggctccccaaggcttttgagtgaaagtcaatgccgggggaggtggtgagggagcccttggtgagctgtgcccattggcagtggccctaggtaggccagagcagctggttgaaatatggcttgaccttctgtgctgtgccatccaagacactaaggaaagagccctcctgggctattgtggaaaaagttctggatatggagtcagaagccctagatcctacctgggttctgccactcaccctcagtttcctcatctgtaaaatgggcatgataataacactcacttcactagattgcttcagggaaaccataggtatggaagagtttgtgggaagagtattcaaatggtcgatgtgtttgtgaggcagccattcccattctccttgggagcagctgctggcccctgaggtatcttctctccagaccagcagagggccccatgtgagatataaagggaagaggagagcacgtctaaggggttccagtctgccaggagaaggcagagagcctggactctgctctgtaggagcctctgctgagatgttccgcaggaacccaggcaggcagacccccgagactcctgttctcatctggctgggtgtgcaccagctttgcccgtggccacctcttttcccactgccctcaggccagtcggcccctcggtcagtgctcccagccagttctgtatctagctcttagttcttactgcccctggctgctcctaagctggtgctgccctgttcatgcatttcctgaacatgctaatatttgtgcacaggcctgggaccctgaggtgaaggggccagcctggccctccaggagtcacaatcccattgggtcagacaggagatagggagtcctgggcgaatctctattgtgcctgcaggccacagggctcagctgggtttctcattaacaaaatggagacagtggtcctcatttagctcagaggcctgcagttcccaggagtaatcaagagtgggctatctaagaaggagccatcttgaccacaggttgctactcaaagagaggaagtattagcttcaggtatttcctttatcaactcctgagatagttccctacatcaatcacagagccacagaacgcagggtgtgaagggtcccgaagttcttctagtccaaccttctgtccagtgctgagcaccaaggctgggggacctggactgtaagggaaccaagtgacagacagtccagggccaaccctgatgtctcccttctctttctatcccctgagccttcttgccaagacatgaggtttggggattttctgtgtgagataagaacatctaaaggctggatctggcttccacataattcactgtggctggaaattggcacaaaggtttgcagggcatccccctccaccttttcattcttactcttcttcccaccctccccctgattcccaccctgctatgttcccactacattcaacttccagccattcccaaaagataccacacccttttacacctccaaactttgagacatcgatcatatttcttctgcctggaatgaccaccctccaccttgagaacgcccattaattctgctcatccttcaaggcccagctcatatgctacctcctccatgaaggagtagtactttgcacacaaagtactcctctagcagtactttgcacacattcttcctactgctctgccaaggtacattgcatttcagaaactggccacacctctgcatgctgcccaagcttttgagcatcttcaggacagacatcagacatggtttctgtctttgagggattcactgtgtcatgggtttgagttcttccactgtggcactgtcactctttggctccatttccccaactgtgagctctcaccccagaactttctatccaaggaggatcaagggactggaagaggcctcaagggccaagaaccaagaaccttggctcttactccttccatcaacttccctaacccagagaatcttctagggctccagaggggcctaacgatttttttttttttttttttttttgagtctcgctctgtcgccaggctggagtgcagtgcagtgcgatctcggctcactgcaacctccagctcctgggttcaagcgattcttctgcctcagcctctggagtagctgggactacaggcacacgccaccatgcccgactaatttttgtatttttagtagagacggtgtttcaccatatttcccaggctggtctcaaactcctgacctcatgatccgcctgcctcggcctcccaaagtgctgggattacaggtgtgagccactgcgcccagtcaagcctaacaaatattagcaagttcagctccagcccataggtgggaagcaagagggattgcgtgtgtaagccagagtcagttaggggaagacagaggaaggagaaagggcagacgggaaaggaggtgggagcaggctctgagttggcccccggagctcagaagggaggcgggagtttttattgagcaggggaaatgggcggtatttaagaagccaccgaagggtcttagttcattggcaggatcaaaggccatgaaagggccaggcgtggtggctcatgcctctttccgagccttactgcgaccacacgtggggcaggatctcaccatctgacagaggagaagaaacatacacacagaggtgaaatgagtgcagcatacaggagggccagcggtgggggtaaatagcaacaatgttcagaggatgacagcttacttagagctacagagacgagggaaaaggagcaggaggaggaagtgcctaagctgggtcttgaaaaactgcccctgtttgtacctatggagatgcaggaagtgaggaattggtgatggaggaaggtgaagtctttttgggtgagggaccgaccagaccagaggccagaggaggagaattgcagccaagttccatgtcggggaagccacaccatgtagctggagcagaggctataggaagtagaagagggagaccagctagggagggagcagtgggcctgctgagtgattgtgcagggaagggttgcagctgaggcactggggacaagatgtccccctactgttggctgcaggctccacctctgactccacattacatttattttccccagtaaaatgagggagccctccctcttgatgataaatatagctactatttggaaacttatctgccgcccctggtaaaggaggcagaatacccagtgcacccacccctgaaatgctcctgcaatgcctaggcctgtctgtgggctgtggtccagcctagcaccccctctcttggagaatgtgaggttggcattgtccctgctgaaggcagcaatagaggggacccttacgacgaccttggcagccggtggctggctgtggacacagccctgcgcttttgttttagtcctaacggatatgccccctgcatcctccattcttcacagcacactcagtccccctcaccacacctgagggaaatcttctctgcctaatgccccacgtagtgaatgttctcccctcctccctcccccagagcaagccattgcacaccagcgaagggcagacagagcacacagaaaattccccagacttctgctttgataggaagtgtattttcatgtaatggaaatgattgtaaaactgccttcccctgcaaaagccctcaggaatatgctgctggaaatgtgcttgagaacagacttgcaaatcatttctctgaattgggaagtcttggttatcttagccacttttaccgatcatgtgaaagccacatctctcgcacccactcccatccctgggtctcatttttttcttttttctgtcgcccacgctggagtgcagtggcacaatcatagttcactgcaacctcaacctcctgggttcaagcgatgctcccacctcagcctcccgagtagctaggactacaggcacgcaccaccatgctcagctaatttttgtatttttagtagagatggggtttcaccatattgcccaggctggtcttgaactcccgggctcatgtgagctgcctggctcagcctcccaaagtgctgggattataggcgtaagccactgtgcctggccttttttttttttttttaactttttatatataaaaaaactctcaaatacatacaagagtggggagaacagtatcatggccctatgttgtaccatccaatttcagctaccatcaattcatggccaatcttgcttcatttgcatcccatcctacttcctcaccccaaattattttgaagaagatcccaaaccccataccattccatctgtaaatattcagtacacagttataaaagataagagctcaaataaataccacatactttgtcattttaaagaaattaataacaattccttagtactataaactaatcaggcagtcatcaaattcctaattgtctcatcaatgtcataatttttttccaatttattaaaagcttcattttaatgtgttttgtaaatcaggtatttaatcatttatccactcgttctgttgaagggcagccatgtgccacgcactgggggatggtggggaatgagacagatgtggttcctgtcctcaaagggggaagatgaccactgcacccatcatcatgaggagctttatggaagggaggcacaggtgcccaggcagctcatggtgaggaaacccacttagcccaggatggggggaagccaccccagtgcgtgagccagagtcagttaggggaagactgaggaaggaggaagggcagatgggaagggagggaggagcaggctcctagttggcccctagagcccggaagtgagtcaggagtttttattgagcaggaggaatgggcggtatttaagaagcccttgaagggtcgcagctcattggcaggaacaaaggccatgaaagggctgggcatggtggctcacgcctgtaatcccagcactttgggaggccaaggcgggggggatcatttgagggcaggagtttgagaccagcctggccaacatggtgaaaccacatctctactaaaaacacaaaaattagccgggcgtggtggtgcacgcctataatcccagctactcgggaggctgaggcaggagaatcgcttgaacccaggaggcagaggctgcagtgagccgagattgtgccactgcactccagcctgggcgacagagcgagactctgtctcaagggggggaaaaaagccatgaaaggctccatcccaggcagaggggctaacactagtgcagacgtggtggtgtggagatgcatcaggggagtgtggaggggagaccggaaggcagggcacgggggacgcagccaaacacggagggtctttggtgtcacactcttagcaggagaatgggatgctaagatcttgttttggagagaaggctctagaggtgaggactgcgggcagggacactggggaggaagcccggggcaggcggagggctgagtgcctcagcaggcgccatgagagaggaaggagcggcgctgggatcaggggagtgagtgacagggcagggcaagagtcaattgtggtcctggggaccaccgcggacccagggatttggggtacagggccttagttgattctcatctagacaggtgccagttgctgacaccctgaattctggcaaacatggagacatcagggtggaaacacctggagccactgccatccaggtgggcgccttgagggccaggccccttggctgctttcccagcagcagcatggagcctggcacagaacagacctggcatagaagtgggagcaaggaacaccgcctgtgggtgcaggagcagtgatcagttagcaacaggggcccccctgcagccagccatccaggcagcaccagacagtgatccatttctctcggtgacagttctagaaaaggctccggagacagggactatcatgtgatcatttttaccctagaccgcttgaccgctttctgtctgaactgatccacctgctagacgctgcctcaacagtcctcgtttctattttattttcttttacttcaaagcagaagggctaatctgctgaggtggagacgagttttcacccactggcttttttttttttcagccgaagtttaaggtaaagtcaggactgcagtttccacaatatttttaccctatcggagagtaaaagagtcaccctcccattatacctcattgtattcccagtgcctggcacagaatgggtactctacacacttgtggatcactgggaccacaagctcctctgtcaccgtaacaggggaatctaggacccagcagttgatgactgtgtgggtggcactgtccaaggctcaaagacaaataccacaggcccttcctgcctcagtgccagggtctgaaaaatgggaaccagcgctttcagtcggttgcagggcaaagtcagagtttgagtgaggacctggaagaagggtttgagctgagccagagagatgggatttatcatccctgccctgcccctgcctctcagatgaatccctgacccaagcctaagtttccatagtgtaaacctggatgttagcagggtgggttaaggggaaatacatgagtggaggtagaaatgatattttagtacaatttgtggataataaagggttagagttccatggggcctccatttagctgagaaatggggaaaatggaaggggtaaccttttccagtgggaggcccagggactctgcagtatcccaagtctggctctgtgagtcattggtgattttcagagagtatactatgtaagaaacatgaggaacagctgctttcttggacaactctttgaagtgaatttctttcttctaccatgccatcaactgtcattataaaattgaagatgtgtttctcatggggaaaaaaattgttattacaagagatatgggcaattagacaagtctcaatacatttcaaaagactgaaatcttacagagtatgttctctgaccatagtggaattcagctaaaaatcaataataagaagattatctttgaaagttccaaatatttggaaattaatgcctttcttaacctatggtcaaagaaggaagtaaaagagaaattatgaaacatttttaactgaattataatgaaaatacaacatattaacatttatcattttaagtacttacagcagaaaagaagaaaagtgtaaaattgtaatctaggtttctgccttaaaaagataccaaaagaaaagcaaattaaacccaaatcttgaaaacattatgttaaataaaagaagccagacacaaaagaccacatactgtataacctcatttacagtcaggcatcgcttagtgataggagtacattctgaaaaatgcatcattaagcgattgtgtcattgtgtgaacatcatagagtgtacttacacaaagctagatggtatagccaactacacacctaggctacatggtatgacctactgctcctaggccacaaacgtgtacagaacgtaactgtattcaatgctgtaggcaatcatagtacaatggtaagtatttgtgtatctaaacatagaaaagatacagtaaatacaatattataatcttatgggaccactgttgtatatccaagtggtcgttgaccaaaacggtgttatgtggtgcatgaatgtatacgaaatgctcagaacaggcaaatccatacagagaggagatttgtggttgtcaagggctgtggggagggagaatggggagtgactgctcacgggtatggagtctccttccagggtgatgaaaatattctggaattaggtagtggtgatgggtgtacaaccttgggaatatactaaaaacgactgaactgtgcactttagaaggatgaatgttatggaatgtgaattatatttcaataaataaaaatcaaacaccccccaccaaattaaacccaaggacagtataaaaggaaggaaatagaaaatagacaacagagaaatttaacaaagccaaaagttggttcttcaaaaaaaattaataaaatagataaaccctagcaagacttatcaaaaataaaaagcaagaaaacacaaattaccaatatcaggaataaaagagggaatatcattacatttaaaggaaaatatgggaatattaccaataacttacctcaataaattctacaactcagatgaaatgaataaatcttttgaaaaacaacttaccaaaactgacagaaaaagaaatggaaaatccaaagagcctccatatctattaaagaaattgaatttgtaataacaatgatgatgatgacaataaacttccttccacaaagaaaacttcagatctagatgatttcactgctgtattgtagaaaacattctttttttctttttttgagatggagtctcgcactgtcacccaggctggagtgcagtggcgcgatctcagctcactgcaacctctgtctccccagttcaagtgattctcctgcctcagcctcccgagtagagcagctgagactacacgcaggtgccaccacgcccggctaatttttgtatttttagtagagacagggtttcaccatgttggccaggctggtcttgaactcctgacctcaagtgatctgcccatatcggcctctcaaagtgctgggattacaggtgtaagccaccacacccggcctgtagaaaacattgaaaggaaaacgtaataacaatcttacacaaactctttcagaaaatagagaaggaagagcacatctcaattcattttttattatcaaaacctgacaaagaccttacacaaaaagaaaattacagcccaatatctctcatgaacacagatgtaaaaatccttaacaaaatattagccaactgaatagcaatatatgaaaagaataacacatcatgacaagtgagtattatcccaggaatgcaatgttaatttaaaagtagaaaatcaaaatattttaccatattaacacagtaaaggaaaaaattcatgattatatcaatagatgcagaaaatgcatttgacaaaattcaacacccattcatgataataactatcagcaaactaccaataaaaggagcttcctcaatctgataaaaatcatccagctaacattatacttaattcagaaatattgaacattaagatcatgagtcaggcaaagttttctactctcaccacttctgttcaacactgtgctagaattctagccagtacaaggtggcaaggtaaaaacaactcctacagattggaaaggaagaagtaaaactatctttattcacagaaaacctgattggttatgtagaaaatcctaaggaatctattaaaaagctactacaattaatgaatgaatttagcaagttttcaggatatatgattaatacacaagaaaataaattttaccaaagacaggaaagacttccaccctaaaaacaaaacaacacaaaatgctgagagaaataaaaaaaaaaaaaaaccaaacatgtagaaaatagattatgtttatggactgaagattcataattgttaagatgacaattctccacaaaatgatctatagactgaatgcaatcctaataaaaatcacaacaaactattttgtagaaattgaaaactactttaaaatttatgtggacatgcaaatgatctagaatagctaaagcagccttgaaaatggagaagagaattggagggttcacaccacagctgacccctgaacaacatgggtccacttatatgtggattttttttttttttctttttgagacagagtttcactcttgttgcccaggctggagtgcaatggagcaatctcagctcactgcaacctccacctcccgggttcaagcgattctcctttctcagcctcccgagtagctgggattacaggcatgcaccatcactcccagctaatttttgtattttcagtagagacgaggtttcaccatgttggtcaggctggtctcgaactcctgacctcaagtgatccaccagcctcggcctcctaaagtgctgggattacaggcatgagccacttcgcctggccatggtttctcttccttatcttttttcctaacattttcttttctctagcttactttattgtaaaagtacagtacataatacatatacaaaatatgtgttaattggctgtttatgttatcattaaggcttctggttaacagtagtctattagtagctaagtttttggggagtcaaaatttatatgcagcttttcaactatatgaggggctggtacctctaatccctgtgttgttcaagggtcaactatatttaattataagtctaactataaagttaaaggaattaagaaagtgtggcattggtctaagaatagacatatagaccaatggagcagaatagtgtccagaaataaactctgtacatataaaatcaattgattttcaatcaaggtgttggatatctagaactaggtatctatatggagaaaaaatgaacttcaaactcctacctcataccatccacaaaaattaatgtaagatggattatagaattaaacattaaaaacttataagcttctagaagaaaatatagaacatctttttttgtattcttgggttaggcaaaggtttcttaaagaaaaattttaaaagactaaacataagaaataaatttcactaaaaacttgcatttcttaaaaattggaaactctctttggctagtcacagagtaaaaaaaattgaaaactcctattcataaaaaaatcacatttaagaaggcaagagaaggcaagtcacacacaggaagaaaatattcacatttatctgacaaaggacttgtagccagaatatataaagaatccctataagtcaataataataagacaaattatgaaattttttatgtaggcaaaagacttgaagagacactccatagaataagatagacgtatggccaataaacatgtgaaaatgtgatcaacatcctgagtcattagagaaatgaagatcaaaattacaaagagatattatttcacatgctctaaaatagctaaaatgtaaaagtctgacagtaatcaaatgttgatgaggatggaacaactgaaattttttttacattgctgataagagtgtgaaatgatgcaatccccttagaaaactatttggcgatttctttcttttcttttctttttttttttttttgggatggcatctcgttctgtcacccaggctggagtgcagtggtgtgatcttggttcaatgcaacctttgcctcccgggttcaagcgattctcctgcttcagcctcccgagtagctgggactacaggttcgcaccaccacgcctggctaattttttttttgtatttttagtagagacagggtttcaccgtgttagccatgatggtctccatctcctgacctcatgatctgcctgcctcagcctcccaaagtgctgggattacaggcatgagccattgcgcccggccagcaatttcttataaagctaagggtacctatcctgtgacataaccattctgttcttaggaatttcctcaagagaaataaaattatattttcagaaaaagactcacatgaatgtttacagcaactttgctcatatagcccaaccctagaagcacccaaaagtttatcatcaacagagaaatggaccaagaagttgtggtataggcatgcaacgggctattactctacaataaaaatcaatacattacttatatatgcaacaacatggatgaatcacaaaaacattaccttgaccaaaagaagccagacacacaaaaagtacattctgtaggataccttttatatgaagtttaaaacaggcaaactgatctttggtgctagaaatcagagcactggttactaagggactagaaatcgactggaaagggacatgagagaacatgtggaacaaatggaaatgttctatgtcttgattgtgtggcggtatacagggaaatgcatttattgaaactcattgaattttacacttaagatccatgaatgtaagtttcacctagttttaaaaaaagaagagagactcacatctaaaatacctaaaacttgaaaaatattatataagatgaggaaaaaaattatttctgattccatgctactaaaaataagctacaaatgtgattcataatagaagaagccatttttatatttagcacataacttaaaggtctaaaggacaagcaagctgggcgcagtggcccacgcctataatcctagcattttgggaggccaaggcaggaggatcacttaaagtcaggaatttgagaacagcttggccacatgctggtgaaaccctgtctctctaaaaatacaaaaaaagttagccaggcatggtggcacacgcctgtaattccagctacttaggaggctaatgcaggagagtcacttgaacccaggaggtggaggttgcagtgagcggagattacgccactgcactccagcctgggtgacagatcaagactccgtctcaaaaaaataaattcaaaacaaaatagaatgaaggagaaacaagactatttagtagactgagaatagctgtttcttattgagggataaactgcaccaaatgctattgtaagcattattatttccttcattttaagggtgaggaaacaagggcaaagagaagttaattagcttcatccagggcacgcaaactaggaagaggcagctgggatttgaactcagggactctggcccaagagccttaacctctatcccatgccccctcgtgcttgtaaaggacttgatgctttacttagactttcccacaacagtttcttgtcatcctcgtgatggtcccaggacacaggctggtccaggataatgacccccggctaacagatggtgagtctgagaccccaaggggttggatggccagctcccaggcctccagaccatgggccgttgtgccgggccgcacacctgagtgggcctggctttttcctgcacgcaggggtgcttgggccctgcttcctggtgctccatgggagtatctggccttcaaaaggaacagatcgatctgaagtggggagagagaaaatacagcaggaccatcactcagagagtcgctgtagaggaagagagggagaggagacgccaggacatgggagctttgtgggagggaatgggactatttgctgagctttgtacagcccagcccaggcagtgcatacaacaaggctttgctgattttaaataacacaaggaaatagcagccccaggtctgagtcaccagcagagttttactctatttctcagctcacacagggacaatagcaatggcaggcactgctgggagataggctagtgggctgggccctggcaaaatcacgacgtccttgaaaacagtcccaggaccttctccttccccttcggatggcccaccacctcaccctctgccctttcgggaccccagcccctctccagtcttgcttccacaggctgctccctgagggcagaccattcttgcttttcccttcaccatcgggactcccctgtcctgtgtccagctccttggaggctctactctctgctctacgctttcaaacatttccttacactgttctctctgcctggatttccctccttctccttgcttcccagtctctctgaatatccagatttcttctggtcttctagcgtcaatgcgtgtgcctctgcaatgcctccttaatccactacattgagagtcattgctccttttcctgtgttctcactttatttacactttttgcatgccaatgacaaaattctgccttgtatcatcggcagaattttccatgtctgatatatctccctctggattgtaatacgctcttaaaggcatcgttcagattcgaatgatcttagtacaactcccctctgtgaaggccaaatggcacacaagccaggagctagaaagccctggttgcctgtggaaatgaatgaacacacatgggctggcagccgtgtccctgcacacctgccttttctcagaggtgtggccctagcagggtaagctgtctggaagagggagctattttgtgcagatggaacattttgtccccttaaatcatgtcccatgaaaggccagcatggcatcctgcttctgaaacaagcactgagctcgtctccatttggagaagatctgtcgtgtgggtatttttaaatggtgaaaggagaaatgggtatatctgataccatggcacttgttacactttaagcacagactctgttattcatactccatctattgactcagggaggagtttatttcaaaccaaacagctcagctatcccaggagcagctgcctcagaaggaaggaggatgctgttctatttcccccatcgaacctccttctcactcgatccacaacagcctttccatgcaaggaagaggctattttctttcaagctttattctccattttccctgtggcaagaaaggtgattggatattgggatttgtaatggttttatctgaaagccatttaaaatgaagctggaatgtcaacaagactgacgctgaatggagtagatgtgaagtggaaatgaacttgaaacaagagatggggttagtcatccccctgatcacttggaacagatgatggaggtcccctgcctctgctccagtgaacagaacagaaccacttgaatactgccagccactgtttgtacataccctcctgaaacggctcttccaaaatgctgaaggacattttgttttcttaataatttggcctttccactgtttctgtatgattgatgtgtttcagcaaaccttttttaaaaaagaatatctacaggtaaatttagctcatcatgtttgagaatattcaccatctctaaatccccagggcctaaatcaatgaggttttagcacattttgaaacagaaccctgatgtataaattctgcaatggctgatttcacgtattttacttcctctctaacaaagctatggaaaaatgcacaagcaggggagggtttgatcctcggtgtttcctgcagatgtgaatctgacaccaccttggagcagggcccctccccaccttctcccaatcctccgctgggttgctgcatttttcactccaagagaccccggaggacagctatatccgaggcttattaaaatcttctaggatgcaaaggcctttggttattcagagcagcaggtctttaggggaagcccccatacacaaacatgctcagctgattctcaatttatattgtgtgttacctgcggggaaaattaaaagctcaaacctcaggcactttccctctcctcccttgattgcccgggggcttgttgttgagatatttcttgttgatttttttgttttttatgtctctggctggtgctaaacattctttctttcccatcatgtttacttcacatctctttgccgtatagatagcttctgctttatggttttttcctccttatctcagatgcagccagcccttccccacctgcccccgccccaaaacacacacacgaacacacaccctttcagactgcatccacactctctgtttcagtggatctgacatcaacgaccccgccacccccggccctcgtcagaggggagctctgcattgaactaggactagctcctgggtcataaaagttgctaggaccctggagagctcttactaaacagatgaggccaccactgacagaggagagaggtcagttcccggagggaacgagcctgctttgctgagcccccttccttgcccagcccccagacccatcacagggaaggttcagaggagctctgacccctccagtacctccttggcctgacgccgctctagcccgggctcccaggttttctgtagggagaggagcacagtccgctccacccatgccatgggcttcatcagtgacaacccaaactcacccccaaataggaatggcttcaacctggagacagcccttcaatgaaatggtttatgctggtggagatttaaaggtattcgtctttcggctgggcgcggtgactcacacctataatcccagcactttgggaggccgaggtgggagatcacttgaggccaggaattcgagaccagcctgaccaacatgcgaaaccccatctctactaaaagtaaaaaaattagctaggcacagtggcgcatgcctgtaatcccaactacttgggaggctgaggcacgagaatcatttgaaccccggaggcagagtttgcagtgagccaagattacactactgcactccagcctgggtgacagagcaagactctgtctcaagacaaacaaaaagggtgtttgtctttcaattgcaaaaatcaagcatggtcactgaaaaaaaattcaaattcacatttcattttgttttgttttgttttgtttgtctttcagccaggtgcagtggctcacatcaaagtatgctgctttcaatatcttctcactctccctccccagggataaccactttcttttttattttatttatttaacttttttgagatggagtttcactagttgcccaggctggagtgcaatggcgcaatctcggcccaccacaacctccgcctcctgggttcaagcgattctcctgcctcggcctcttgagtagctgggattacaggcatgtgccaccacacccagctatttttgtatttttagtagagacggggtttctccatgttggtcaagcaggtctcgaactcccgacctcaggtgatccgcccgcctcggcctcccaaattgctgggattacaggcgtgagccactgcgcccaggggggtaaccactttcagtggtttgagatgtttgtctcttcatagaagaaatatatgcatatagtttgggttttggtattttttttaattaatggagttctaatatacatgctgccttttttcccttaccatggaattgacacaggataataaattaattctaagcaacaaatttttctttaacccatcctgtctctaggtttctcctcacagaaattacaaccccttctcttgtggttccatcccatccctaaaacagtatttatcctcccttctctgtaccattactgtttcttgtgcgaaattgtaccttggagtatgtactgaatggtgttgtactggaggcctggcgcggtgactcatgcctgtaatcccagcactttgggagaccaaggtgggcgggtcatttgaggtcaagagttccagacgagcctggccaacatggtgaaaccccgtctctactaaaaatacaaaaattagctgggcatggtggcggcgcctgtaatcccagttactcaggaggctgaggcaggagaatcgcttgaacccaggaggcggaggttgcagtgagccgagatcgtgccactgcaatccagcctgggaacagagcaagactgcatctcaaaaaaaaaaaaaaaatggtgtttcccttgcactggtgccctgttggctcctggcctcccttctagaccatcagctacctgtgggtgggagcctgtgcctttgtcattggtccatcctctatcccgaggccccgggacatggcctagaacatcagagactccagcggctgtttctcaaagtgaactgaactagctggtgtttcccacacgatggagccccctcgacctgccctcgattctctcctgacttatttctccccacatcttgggccagttccagctggactagcaaagagggcagctttacctctgtgctcccaacatgccctagtgggtggcgtatggatgggggagcctgggacaatgtgtgtccatctcacacactctctacttcccatgccagtggggaaagtgggggcaggaatagagcccgggagggaactgccagagactgtcttctctgctaaggctgacaggaagacggacaaccatgacagtggtggaaggggaaggcccttggcccacggggaatggctgtctggaagctgacttgttgttgggggcctggtttgggcaggaacccctggggtggctgcagaaggaggctgggcttcacagacccctgtcggcaggcaggggctacgccccctatactaggcttctgctcagggcagcagggcccggagccaccagcagagctgaggaggctgcagaggaggctgagagatccatggaggaagaacatggtggaaaagagtgcctgaggtccgcttccacggccactctgaccagcctgggccttctgtgccttagcattcccgttcctaacatggaactcatggcctttgacccgcttccctcacgaggctgctgagagggtcagagaagaagccgcatggggactggcctcaccctgggagaggtgagcaagccacgaggtcccatgttgcatgaaaagtcaaatgctgttaggacgactcccaggatgaggaggtctgaccccatgctcatcgtctggacagctctgaccctagaatttatttcctctttccccacagggcaatccttctactctcgggtcctggagaactgtgaggatgtggctgactttgatgaggtaggaggcccaagactcccccctccctcagccctgagcccagaggggaacagccacccttcgctgcctcttgcgggcacacactggccccaaatcccaggcactggcctgctctgagcccctcacctctcagctgcttcctgaaggaggtggtaaggagggtgtgcaggaactccctcccccatgttccccccagaaacctctgcacaggtgaggcccgtgtgcaaatgacacggggaacagcagcctcgcccacctcgacggccctgctgggtctgggcctgttattccctgtggagaaagagcccacaggtgctgtagacctgaatgtgagccaccagctgagggcccaacgaggcaggcgagtgttggggacgtcgcaaaggccagtctgtgtcagtccccaggggttgaagagcagggcagccccgggcactgaggtaggagccccagtcaccagggaaacattgtcaagcaccccacctgagtgagggcgccatctccagaccttgaggggaagcatagggaacagaagacagtctggattttcagaaacagctctgggggttccatgagaaaagacgtgagctgctggtctattgacaacgatttttctcaatcctcactccagctgggctgttgtcacaattttatcagcaaaggagcaggcgacaccatcccacaggggtgcccaggagcagtgagaggacttacaacgcttccctctccctgcccttcccctcggtacctggccgggctgggagccctatcctcacacacacacaccagctcgagcagcctgcggcctcctccgcctcctcacattctttcgtctatgtgtttgctgcttccagaatctatattcccctctggctgctgtaggttctccagggatgactttggagtgagggccagcagtcatccgtcaccatcttagcacaaactggaagccatgtagtgaccctcaaatagtgtaccccctctctcctggggttggctctcccgcttggctctgtgggggctgggaagggcctcatagcagactgtgcctcttgaggttggctgctggcgttcggctgagcagccaccaggctgacacttggcaccagctgtctccccctcctccagaaaccaggccacacgatgtggctgtgtccatcgacccagagctggagacacagggagcaaaacctcgctcctcactcaggcttaggcacagccatcaaccatcgcggcccagcaccacaccctccccaaccacttcagggcgcagttgccacgacctccctggtacgtccccactgctatgcaggacaggtgaatcactcatttaaagtgaatcactagagctaaggaagtttctgtccttaccttctccccctcctggctgtacaatgacctcagtttctaaacctgccaccatctttgtcaaatggggttggtgatgggtgtgaaggtctctgtgaaatgatgaacaaaatgaagggttatggtgagagtggaatcatggctgcccactgagacagctgtcatagatgcttcaggcttgccccattacacacccggcctgctccctcccctccccatttcctcagtcagggcactgggctggctgggagaagatgccagcagcctggcccagtttcccatagtcctacctccctgggcttctgcccactaatccaccaggcacagcatctgactccctcctcccaagactcccaggggatatgtcagcccaggcgttcagccagggggcaacctgatgccccttccaagggcactgccacccttttccatgcccagcgccttggacacctgagccacaggtatgcacgacattcaaagttaatcaccatgtcgttcctcttcccaactccgcccagcctgcctcagggggagagtctgtctctgctggccctgaacaaggggccacattccgagcatctagtgcatgccaggccgggcttgagatatcccagaggcaggaacctgggctcaacaccccatgatgatttgtatgggagcttagggatggggtagccagagtcagtgtggagagactggggcagggcagaagcagttatggaagaagcacatgactagggtcagagagcagggcacgcgatggggagaagaggctcctgcccggggaaagtgctgcccgcccactggggagacagggaagtttctggttgttgcaatgaggagcctactggcatttagtggggtggggagcaaggatgcagaatgacttgcaatgctcaggccatcccgcacttcccacctgggagccccgtgggaagatggtggcagccccagcagcagcactgagctgcttcccgagccatgccccttccactcaatctccgaaatcatccacagacgaaattaggctcagatggtaactacccttccccaggtgacagagctggaagcggccaagccagggttctgaattcatgcatagattagacctaagccctctctggatacagtgatagggcctgactcccaccacccctgcaaggcccgtgttggagtctctccacaccccctgcctccatttctccctgggcaaagtggcctcagccctggccaccaatggtcagcagtgcacatcccacaaagcaggaaggccaccctcccattccctgttcaggaacggcccggaggcctgggtcagcccagtcccaaaggtagcctggagccataccctggctttaacctttctccctagacccagtggacaagttgtaaacttccctggcttccccctgaaagaatctgcctgccagtggttccagaatatcctgggaaagagccctttcaaatccccctgaaccttcttgactttccagaaagcctcttctctccgtcttactctgcccagggcctgccggagccagcttagtgagacacactggcctgggagtcatgagacctacaccacagtccttgctgaggaacctctttgggctttggattccccttctgtaaaagagagatatgctccctgctctatctgccccacgggactgtcacaaggctaaaaaaagatgaaatgagagacaagaaagcaaatgtctctcacagctctactaggtaaggggttccaagcaagggaggggcccctcctctgctcaggcatgggtgagaggggctgcagcagctgggcttaggaacctgagtggggaggaggatgccatggaagaaagacaatgctctctacaacaatgggtggaaacagagcctggacatggtgtctcctttcccagaggctggaacctgagcccctacatttaacctacaactctggaaaagctagggagagacagagaaagacccagcctttgtgacctggggaaacaggagtagccacctttagccagtttggtttggctctaacacaggccctgtgtggagcaggccccaggggagaggccagagtaacaatagtacttgtgccaatgataagaagaactgctgctatttactgagcacttagtgtgtggcaagatgggctgagagcttgacacaagcattagactcactagaacttgctggattggtagcatcctaggtgataaggagccacaacaggatttaaacccgagtctatctgattccaggacctatggtcatttgtaaagtagacaagactcagccctgccctcaaggggctcagtctagcgggcagatggacccactacaaacaaggagggaccctgggccttctgagccaagaggaagaagaggtctccagcctgggggatgacagggcaggggagtttggccttatctgcccctttctgcttgtaccaggaagtcatggctgttacctcctggaggccagaaacgcacctgtcttgttcgtcattggcctggcacccagcatggagttgagaaaatgttgccgagtgaaagaatgaaaaaaacagtgacgttcactaggactggcacctgtcaccgcaggcctgtgcccagaccgagtgggctcagcagggctagtggtacatcaagccctttgctgtggcctggatagaaaggaagcaggcaaggcacagatgagatcacctaaagggactttagatcaccttgatctctaaggttagagatcatctagtttaaccctcttgtcttgcagttgaagaaacaggtcttagagtggggaagagaattgcccaagaagaccagctgagatctgagatcctacatttaacttacaactctaaagaagctggggaaagagacagagacaaagacagaaacagagagagagagacagagacacagagacccagcctttgtgccctgggaaagtgaaatagccacactcgggatactgagcccaggcctttaagcttgcaaatccgtctctttccattgtactctaaagcagcagtccccaacctttttggcaccaggggctggtttcgtggaagacagtttttccacagactgggatggtggtggctgggggttatttgggatgaaactgttcctcctcagaacatcaggcattagattctcttaaggagtgcacagcctagatctcttgcatatgttgttcacagtagggttcacactcctatgagaatctaatgctgtcactgatctgacattagatggagcttaggcgggaatgctcgctcacccgcggctcacctcttgctgtgtggctctgctcctaacaggccatggactggtactggtctgtggcccgggatatggggacccctgctctaaagctttgtagtgcatctcaatattttcccccaaacctatagccctgtccctttaaggatgctaccttgctgatttaggatggttccaggcccactcagcggccaagctggacataatccagatcattctccaaggtacatcagggaaaccttttttgcagagtcctagatcactggggctgataggatgcagaaccctgtgccccggccagcaccagccaggtcagggctaagcctagaccaggaaactgggtcaggactcagcactccccgggctcctgagatcactccctccaacagaggccctctttccctccctatctgtactacctaccaccttgcttctgtcaacagtcctatcccaggctgctattccaggtctgtgtctgtctccagaactatccaggaccatccccaggactgagaaacaaccctgcatccctgcgttctgcacagcgtcatgcacagagcctggcacacagcaagtgctcagcaaatgttcgcccccagcatggggcttgctggctcgtgacatcttgagtgactgtgtttggcttaactgctacttgagtcccccagcagtaccaggcttcaggagaggattcagtgtagtggattaagccctgaggactgaactccagactaagcatcctgagacttgagtttgaatcctgcctctgccaccaaccagccttgtgcccgcgggcaactctcgcctctccactttcccacttgtaaaaggagcacatctttgccatgttgctgtgagcttggttatgggtaaatgtgctctggaagtactaagtcctacccagatgaaattcttccttcagaagcccttttccttcagtctttttttttttttttttttttttgaggtggagtcttactctgtcacccaggctggagtgcaatggtgccatctgggctcactgcaacctctgcctcccaggttcaagcgattctcctgcctcagcctcccaagtagctgagattacaggcatgcaccaccacacctggctaatttttgtattttagtagagaccgtgtttcaccatgttggccaggctggtatcaaactcctaacctcaaatcatctgcccactttggcctcccaaaatgctgtgtttgcaggtatgagccactgcccccagccccctttccttcaatctaatagctcacaagttcaataccatagtcaggagaggagtgtagctcccaaaccctcaaaatcctcatctcgtcttgctgtgttctcagcatatcaccccaaatggaggaaaggacataaccacaaaaatgaggagacaatgaaaaatgaaattagggaagagaagatgcagtgaaagagacacgtgaaatccacaggccgaggcagaagaggaaagtgatggcggcgaaggggagggaggtggcatgacaaggagacaaggcagttgcagacctgcacagagttcccactgggaagatctaaactaaacacattctgccgtgctgtgtcacttacgactgctgtcacctgtgagatcccatttgattctctcaatagccctctaaggtagatattgtcacccccctcttttcacagatggggaagctgaggcacagctagtgagtggcagagccagggctagaactcaagtctcctgactcaaactcagagtttctgcaacaccacggagactcccagtctgcgtgagatacaagcctcggtgttgtcagaagaacaaaaaagaagcaaagggtgggcatgtcctttggagctctgtgaggtgcccagagctcacagaggctgcctcagcaaaggaaggtgtcagcaatgggagatggggctggaaatgctgtctgggcacagcaagggggcctctgggtgctaggaaggggaatccccacctctttcagggagctgtagaggagccactgaaaagttttaacaaaggagagataaaaagagaggaaaattcaaccccaaaagtctccttcttacagcccatgcctctacttccagggaggccaaatgggagtaacccccagtcccagaccctgagtcacttccctccagccaagaggcccgtcaccctccgaggccccacactgatgccaggaccccacctagaggtgccggcttgatcggtctccaggctgggccttgggatttttaaaagcttctggaatggattgcagttccagccaagatgaagaacccctgagaaagacagagggagacagagacaaagggagagatagagacagagagagaaactgatgaaagaaaacagatgtggtgaggagaagaaagcagacgaatgatgcgggagggaaggaaaagaaatgaggggaaagcctcgtgtgggtggaaaatgcgggagggagacaggggaggaaagaaaggaaactgtaaggtgggagcaagtcagagaccgaagaagctgctgtgactcagtgaggaccctgtcttctccctcacccggaaagcctccaagaagaacattccccgctgacataggcatggactgcccagacccggctgacgaatttctgaaagggcacctgagccacacacctacacacgcttcccctgattattctcatctgcagtcaggggccccggaagccccctgtctcctgtgccctccctgtcccccgactctcactcaacaaactggccctcgccccgcagccaggcagcctccctccccaggtcccttagcctcagcctcccgccaccgttcaacaccccacctccctttcacagggccatctccaaagtcatgtcctttttctcctgatctttctctccttccaatgccaaaatcccacccacagaccctcagggggaccaatcacccctcccctcttcatccccagtaaaccaaatctcggtggctcctgcggccccccgactcccacacagcgccctggctgatgagctgggccttcctgggctgctttatttccctgcagccccataaaagcagcttcattaagaaaaccacacactctgctgagctgccagaggcatccagaagctggagccgcagccgctgaatgaggcctgtgggccgggctgcctccacttcctgggactctcagcgcacccctccgccctgtgcccacctcgcctctgaagccctccctaggccctgctcagaaccctccccaccccaccccgcagacccctctcccgctcctctgcttcttcctccctctcatgccaaggccaggtcctcccttgccagtcctgaagggagatgtcacaaaggccgttttcctgagacaggccctgcccacactgggcagtgacccgcggtgctggcccagtgtgcccaagccctccaagtccccaggctgggagaaggaatctcagctttgggaatggcaaacgtgcagggtgggctcacagaagcctcctcccgagggcctgctcagccagcaacagagtgctccaagtcatgcatctgctctgaggccgagttccttgtttatagagcacagaagccattacccacctctccggccattggaaagactaaatgaatgaatatgcacgtagagcattcagacctctgcataagaaaaagttccccagaaatggcagcgattattactattattatttattactggactattgagcagtctgaatttggtagggtataaaaatggaactaaaaaataaaaagtcactgccttctaccagatctgtcaaaatcctccctgacacggtctctccacagcgtcttgagcagacctcagcgttgtctggtcctgtccagaagggcttcctactccagtctggcatcctgttcacccctggccatcctccttccctcatgcttgtggctcaggatgtggagtgggacagggacccctgctgaggccctccacatcctcccctggtgggcagcccatggaaaaactgtcctcatatcactctaccccacttggccaatggagcgcaaatagatgacttgccacagccaacagtggcaggctgggctccttgccctgctgtactctatgggtctcctgccagtccactgccctgcagatgccactggggatttgcatgccatgctgcccctcttgcaggtatctaatcaccatgagctgtttccccaagaagtaccacaaaaacactacgcctaggacagaattcttcccacctttcccttgcccagtcttctttcccatcccaggaaggtgggctgggtgatggttggaggtaacagggcctttgaggaagccctaggaagatgtctggctctgcccattggcagctttttacagaatggggcactgggccactttagcctctgttttgagccattgttgccacttctagggcaccaggaaaaatcccaatcaaattcctactcatcattaacattgagttagggaggaagcaacgaagaagtggtaagggtgaatctagaaacaatgagttggggacaggctgtgggcctgaccccaataacactaatcagctcaaacctgtccccagtgttaccactggcagagtgaggagtggtttgaactcaacacaggagtctggggcagagcctgtgccagtcagggtgattctgatgagagagagctggaagctcacagctccattcagcacccaccaaaaaccaggctcacacccacattccttgctgtctccctgggacccgaccaccaccctggttgcaccaccctctcccaacccccctcaggagctgggaggccatggaagcagcgctgtgtagggagtcaaaagtcctggtaggtccaggctcttcacctaccacatgaccttgggcaggtcctccaacatctctgagcaccatctttgaaagaggagtgggcaacaatgccggctctacaaggtggttgttggaactaaatgagattccaggtgtcaatgctttgtccctggggagcactgggcccaagtgaggggccactctgactgttggagatccccacaagagattcccctcccacaccccacggctcctacctgttattgccaccgaagccgcagttgtccctctctccccagacatttcggtggccggtggccagcagcatcgacagaaatgagatgctggagattcaggttttcaactacagcaaagtcttcagcaacaagtaagtgtgggatggggcaggaggggctgggcctggacgggctgggagcctgctcttctccttgggctaccctctgtttggggcttaaaaaggggacctacactcccaacctgccctggattgatcttcaaagaccgaagaaatcttgggctggtctttgatccccattttgatccctcttcttgtcttcagaatcccccagttctcccagctgctgtcagccaagaacactccaccctcctatcacctctgctgtctccaaccccatcaaagcttcctgtcttaaagacttaaagctttaagtctccctcaatgccacgctggggtacagttacccactggagaggcgaaaggtggaggggctgatgatctcctccaagagacactctgtagccctgagggcaggcttgacagtttggggtggtggtttaggagtcaggcaagcctgatctcagacactcaggtcagtcatctactgtgtgaccctggaaaggttacataacctctctgatttcaatgtgctcatgtgtgaaaaggacaagtatttacctcaaagggcagctgtgtgaattaaatgagatagatattcactcactcattcaacaaatgtttactaagcgtcgattgtgtatcaggtactgaattaggtgatgcagagggcggggtgcctaccttcatggagcttgcactccacaagtgaagtacacctgccatacgagcgttatcactataaggtgttcaataaaagtagttgtcatccttctctctgggccatgagaagaattcagaaggatttgaacacgctggaacagtggctaagtaatatcttgggttaaaaaatcacagccaggtgtggcacacacctgtagtcctaggtccttgggcagataaggcgggaggatcatttgatcccagtaatttgaggctagcctgggcaacatagtgagatcccatctctttaaaaaaaaatcggttgctcttatacaagctggaggtcatggcttaactgtaacatgtccaagaaggtatggaggtgttagctcactgaggactcagaatgactcaacagtgggaggagactacaaacaaaagaaaagtaggcctcatcctaaatcatactaatagaattaaagcactcctgatctgagcaggagagacaaggagtccactgctctgatactagtggcagagaattcctgtaggcaccaccctatagtttccaggaggaaagggactttaagtgttaccttataacaaatggatgagagcctgaaagggaaaatcatagaggacatattcatccattcatccatccattgatccattcatccatccatccatctatcattcctgttattcatccatctgcctatccatttgtctgtccatcaattgatttatccacccttcctttctttcatccatccttccatcctttcatccatccattcatcaatccatccctccatccatttatcaattcatttatccacccatttatccatctatccattcatccgtccatcctttcattcatcctatccatccactcatccatccatccatccatccattcacccatccttcctttcatccattcattcatcaacccaatccttccatctttccatccattcatccaccacttaccctttcatcctttccattcatccttccatccactcatccatccattcatccatccttccaccttttttcttttccttttttttttttttttttttgagacagagtcttgctctgtggcccacagtggagtgcagtggcctgatctcggctcactgcaacctccgcctctctggttcaagcaattatcctgtatcagcctcctgagtagctgggattagaggtgctcaccaccgtgcccagctaatttttgtatttttagtagagatggggtttcaccatgttggccaggttggtatcgaactcctgacctcaagtgatctaccctcctcggcctcccaaagtgctgggattacaggcgtgagccaccacttttggcccatccttctatctttccattcactgatccatctatcgatccatccattctttcattctttcatccatccttccatccatcatccttccttccatccattcatccatcctttcattcttccatccattcatccatccatccatcttttcacccaactttgcagtcactcatcatacatatagtgaacaaatgctttctgccagtcagacactatgctagtcactggagatactgagatgaggtattgaggcacagtccctgcccctaccctcccagaaggctttttgccacaggaagaggaaagaaaggtgtgtacctagaggcaggatgaggaacaggctgctggaagacagcagacaactgaaagatagccagtattttccagccaatgtgctgtcttaggaggtagtgagctccttgccactgggagagggtgagcaaagagtggaccacattgtagaggggatttctgagtcaggaaaggccccaccatatgggctccaaggagtctctgattctgtgggttttattaggagctttcaaaatctcagctgagtatggggcaagggcatttcagaaatgctgtcagggccacagggaggatgtttagtgcacaaaggccttccctttgcctctcatggcatcacaccattcaggcagctgcttttggcacccacaagcaaggttggtgagacaccccccaccaggggcccccaaggtgaagcagagccttcttccctggggtgagataccatgagggtgtgacctatgaggacaggagaaacaggaacaagtggaaggctcacacacagaccaagtgggtgtgaaaaaggaaggagaatcggaagtcaagcaccagggagggcacctgagagcccctgaaggaacccaaccataggtgccaaagcatccaggagctttacagctcagccactacagccctagctgtgcaggaggggaaaccaagtctcagaggggaacctgaggtcacatgggtagacaatggtagagccagggctagaatgcatgtctgttaacttctcttcctaatccaactcccagaaaccaaaatatttgagcagtgatggtggaaactgagggcatggaagacattgttaaatcatttataatgaaagccaccagcctaaccactgaaatgctggaaacacttgagcccatcaaaagactgctacaaacaaatcagaagtatttgggaaatcgggaaattgactcccatgcagtgaatatgttgaaagttacagcttctattaggtgtttttggtttttgttttgttcagagacagaatctcactctgtcacccaggctggagtgcagtggcctagtctcggctcattgcaacctctgcctcctgagttcaagtgattctcatgtcttggcctcccgagtagctgggactacaggtgcatgccaccaggcctggataatttttgtatttttagtagagacagggttttccccatgttggccaggatggtctcgaactcctggcttcaggtaatagacctgcctcagcttcccaaagtgctgggattacaggtgccagccaccaaatccagcctgtattagatgttcttaagtgccaataagaaggaagacagaaaggggaatagttcctatcctaactctcctcttcttccctccctgcccccatccaagagaaggcaggaaaccccacaaggggaggcccaggcctggtgggagaggttctggcatttctttggaagcctagagaatgcccagggcactgctggctgcagagctgagatgggaaagaagaggtccccttgtggagagcacaggcccaggctgacacaggccagcttgtgggggtcagagtgggagagaggtgtttggaatgatgtgagactcaagtctccccatcctggcatttgcctgggccaggccagaggagcaatgaggccactgccctcaacccccacatggcccagttcagaccccaggctccttctcatggggcagctgagtggaaggggtctttggggtctgcactaggcttagcaatgagcaaagccatggccactgctggggacagtgcctggcacatggcaggctcctgattattttgtggaataaaagaatgaataaatgcccctgtggtgttaggaggcagagggtaggtatacaaggtgggagagcctttgagagggaatcggagtggcccctcttctctgaaggactcagggcactcaagggtgacactcagcatcacatgaccgatgcatttggggaaattgagctaaaagaggcatggaggagctgcctgggagagtgggtcccaggacgagaaatgagcctgatcccatcactgccatctcagagagagagacttgtcctagaagcagagagtagcttggaaactggcccctcacccagtggttctagaggctgccaggaggcagagacatggtatgaaggaaggaggcatcctaggcagaaaccaggagacctccaggtctgcttggccccgtttggaacaaagacctgtgtccaggaaccttgggcttccccatgagaaagaaatgttcggttcagaagattttgtgcatccagctctgcctgtccgggacctctgagggtccatggcctggcctccagcctcctgcctgctaaggatgccagggaccctgaataattcaggagccaggacagcaggagaggcctcgcagggcccaggacacctgacacgggctcccaggggaaagtgatgaattattgacaggattctggtgcccagttgccgctctattgtgatcagtctgtgggcccatctgggctggaggccttttcctgccggctaattacgtggggatcttagctctgcccagccgcccagcccctcgtggggccagacagcctcctgtgaggggtgtcctctttgccatggtgacctggatggccctgtaaggcaagtagtcagaggacatggagttagccccagatcctttgcctgacagccccagggaaactgaggcccagagaggcctcttgtccagggtcacacagcaggttcaggacagtcaggtcttcaccccaggcctcctgacacccgggccagtgctccttcccacagaacacatggcctcacaactccatttctagggaaatgactcagctgtctaaggagcatatgagcccacccttcctcaatcgtcctgggccccactctcccaggcagctcctccatgctgacccatgcagaggagtaagaacctactatgtgtgcagccaggatgcacaaaggccagctgcggcgggcagggtcgcctctggggtcaccacaagggccagagccaggggcttctcctacctcttcctgtcccagcttcttcccaaagaatatctatagaagacgggctgagggatggcatcctagaagcagtgccagggcctttgttttgaaactgttttcatggcaagcactgtgtttttgcttaaatggtatgttacagacctgtagaaagagtcaaggtttataaaactgcttttctttatactttacataaggctgagataatatcaattgtccatgtcaaaaaatataatttttacttttatttgagagaggttggggggtgaactgttaggagttaaaaccccccaagccactcttggaggtgtggcaaattgattcctttaatcttgcaagctcctagcgtcccagtcccaccctccaggccatagacaagctctggctgtgcgaggctgtgcacagcttgaagggtgggggactgcctggacctgcccctgaagcccatcctgcaaaggagactcgccctgtgtaggctctccagatggccagccctgctcattattagggagggaggaggggctggcatccgagtgccggtgttggtagaggaatttcacatgagcagtctcctcaccactgtccggtggaagtcggagggctatagcagaaggagccaaaaccacactgctgccaggaggtggaatctcccttgggtcctgctgagtgagcccacatctgtctgactccagagcccaggctcctcactgtctacaccgcttccctttagggatggaattaatctgcatgtggacagggcttggaccagggtaggaagagtaggggatttgcctggaggccaatcttgctcagcacactgtgtgattaaggcagtggctgaatggactaccagtgacagccccatcactgtcaccaccaccggagtatctagcagggacttaaaagcacatgtcagggaggttgtttcagggattcctcctggaaggggcgctggacaaggtctctcaggttcttcccaagtataagatctgagattcaggcaggttaagcctagaaggcaccagacgcctctgtgagcacttgcagggggaatagctccaccctgccccctgggagtgtcttgtcacattgcagcacctctgcggatcctggggagctgccttggctgttcttaggcatctaattctggagaaagatgtgcctgatcgccccacgctcaacaggtgctcgacaggtcctaggggaatcaaggcagctgaatagccatccacaaagggtaatagtagagcagggattctcaaagtgtctccccagccagcagcttcagcatcacctggaaacttgtcagaaatacacattctcaggccctctcccacccactgaatcagagccctggggtcggggccagtggtgtgaactgaagtccggtggacccagtttggtgacttcacattagaagcttgaagttggccatggcgggagtatttatatctcagaaaccagcaaatgctacagatgagcacctctcctctcccaccagtgacacattttccagcatatccacagaagaggatatcccagccgtgcatgttttcacaagccctccaggtgattctgctcatgctgaagtttgagaaccactgatttagaacaaaaaggggtgaggctgcaaaaagatgagtgtattttttcgtgcccgtggtctactgttagaatgtctacatggtacggaagctaaaagtccccttccctcttcattttataaagaccaaattgagactcaggggcagcagctccagggctcctggcccccagcccagcacttctgtctctggggcactgcctgagctgggagaggtgcatgcagctatggaagaaggcttccatgggctgctctaagggcccagaagcccagttcggctttagagtgaaggagtggcgtggtcagtttcatcctcagggaggtggggcacaatggtggttggggctctgagctccaaaggggagcatttcatatccattcctcatggctgcccctaccacttcctcccctcacacagatgggaagatttttaaaaaatcaatgttcaccctccacagacctcagggtggtagagacatgaagcatgtctgagtcagaattcatctgatacctcacctcacccagatctaccattaattagctgtgtcccttccccttccatggcctcactgtcttcctctataaatctcaggcagcatcagatgatgcccaaggtcccttccagctctcacacgccctggatgcttccctcccctttgtgccttcagctagaaatggtgtgtgtattctaatccactctatgtggaagcaccatgtaagaacgtctgtctgagttccctgttctctcccagagcaacaaacagccttctgactgtggggtgcaatggggttgaagtcaactccatcagcatttattgggcacccactgttgttcattaattcagccagcagatattgagatctctagtgtgctagaaatgtcaaacagaggctagaataaaaagcaccacccatgcccttgagaggttcacagtttagaggcagtacatgaatcacgacaaaacggactgctttggagtgctggctgtgtgctgggggctttgacaagaacactcgcagatgatctcattcagtcctccaacaacaactctgtgaagtagggcttatcagctcatcttatgagaaaaccgacactgagagagcttaaggaagttgcccaggaagcaggtagcttgctagtcagtgtcagagctgggttcagatccctgtctctttgatgccaggactgtgctgttaaccaaagcattgcaccgcctctcccctgctgtgcagttccatgggctctgccatcacacaggttcctgccatccaggaacttacaggctgcagatgtggaatggatgagtgagtgctgttggtgtgggctggaaaccttggtcatggttaggcgggtagaagccggaggagctacttgtccatccaggaaactcaggtcctttcccagcctccacactgagcatctggaagcttctctgcaagggctcagctaaagctggatttcatgcacctttccccgcagtctgtagacatcccctaagggtgctcactgccccttggagctctcccaaggaaatgggcctcccacaaacaaccatccacagtgggacatgctgccctggctgcaaccagtcctggctcctgggccaccttctccagcccagcccagagctggagcaagcccacctgagtcctccccaagcagtcacagcccttgggatgtcagtcttgctcctcaccctggtctcttccatgttaccaccgtgccccctctgccatccccaggctcatcgggaccttccgcatggtgctgcagaaggtggtagaggagagccatgtggaggtgactgacacgctgattgatgacaacaatgctatcatcaaggtgggtatgccccacggagttcctggactttcccatatggggccatctgggggtctgttctccctgcctcacacatggggtggtctggggaatgcctctcatgcatggcgaggtgtcgcaggaggaggagactcaggtcagactctgctggaatggctcaatctgtggccatggctggaggccctgtggcatggcagggtctgctgccccacagtaggcacccctgcccttcctacggtgggaatgcaccaactggtccttccatttggacccagctcaggagtcactaaagaggctccttttgtcatccaaaggccagactgagccctgctggcactcgagggcatgaccttcactctgcacatctggctcgggtcctccctgggagggcagggacctcatttcctattgtttgtcacatcccagcacttttgcgtgagcacgcgtgcactagtgatgcacagtctagaggcacctgacacatgttctaacaaagaaggaagcaaccctaccaggacagcctggccccaggctctgctctgattcttcagtcctcttgagctcagccgtggccactcatgggcagttggcatgatggtgaggaacagggaccctgagtatgaatcttaggctgctcactaactgtgtgacttaggcaagctacatatcacctcaaagtgagcacaattacattatccacctcccaggactattctgaggattaaaggacaatacacagaaagtacttagcacagatatgcacaataaatctataatattgttagctattatttcctgacctcagtttacctatgtataaaatgggactgtgccatggtcccccagtggggtcctgtgtaatatatggccctatgtagtggccaagagaaacagcctcagaagccaggactgcagccacagggagctagaacagaaggaaccctcttctcccatgggcaggggtggcagggagggcttcttaaagttaccggggtctcagccaccacagcaaggggagaaggggtgcagaataagctatgtatggacacccatgggaaggcgggctgggaggagaacacagaaacctggatgaagagtgtagtgtgggaagtgagataagagaattggggagtgagcagggatggacagacagcacagcccatgccctggattttcagaatcagacttaagatgtcagcagaggaaaggactcacggatctcctagcccacttgccacccatctccgctacccattgttatgaatgggaacaatgaagtcctggatggggaatggattcggccacagttgacagcagggccagcacggagacccaggacttccaatgccagagaccaccattttcccataacaacatacttggttccaccaagagggtcccatttgttccagaaaggacatggggcttggagttaggcagcctgggctcagatcccagctccagtacttcctagctgtgtgacttaaagcaagtaacttaacctcctgatatgctaggtaaggtaggttgcaatgttgaaaagatcaaatgagtgtacattaaagcatcttagcatgatgcctagcacagtgaggattcagaaaatatgtgcacctttcccttcccttgggaaatctaagcctgggtgctggagcatccaagcactgagtgagggccgcctgtctggggcacaggaccaagtcacctctagaccagtgaggaagggtgatccctgtgcactgggggggaaactagagctgcaagaaagtaatggctccaggacgcagagcaggaagcccaatcatgactctccactgctaagcctgagcccggttgagtgctctactttttgccagaggaaaaccctagggcagctcccaagattccctccctctccagggtaggaagggtgagtgtgagcctgggccctgggctcctctcccggaggccactttcagctcattctgtccatttccaacaagccgatttctggcgggccgcgcctcatgcctgcaggcagcccttgttctgaggagaggaggtggcctgatcatggggatgctgaacgacactctcggttatgtagacagtggactcggggggtgagtccaggctcagttgtcctgggcaggccaggcccctccaccttgagcaccagggaggagtggaaccaccagcagcgggacctggagccaggtaccagtaagctgacccggtctgcacaagtcagcctttcagagcctctgttttctcatcagcaaaatggggcagaggggatcataccatcctgacctcctccagtgaggcaagggtgtggaagcgctgtgtaaacaccaccaagcagccacatatacggggtggagattgctgtcaccatcccagctgctcaccaccgcctccctcccttcagaccagcctgtgcgtggaggtccggtatcaggccactgacggcacagtgggctcctgggacgatggggacttcctgggagatgagtctcttcaagaggaagagaaggacagccaagagacggatggactgctcccaggctcccggcccagctcccggcccccaggagagaagagcttccggaggtaacaggcaggacccctctggctgcccactgctcccaagacacggggaagagacctggggcctggtcctactgacaggcctctctaggcctagctgggctcagagtacagggctgagcttctggagagacatccaaggggtgggaagatgtttctgtagccccccacccagccgtccacccccgaggtcactgggcagggagcaggagactcagatggagctgcaaggccaaggcctccccagtggccctgagggaggtggagctctaacacagggatggggctagatctcctgcctttctcagagaaggggagttggggataggagggcccctggcctctctggttcaagacccagcagtgtccaccaggtgccggcagcctgacctctaccctggcccagtgaggaggcccaagagagggcagctcttcctgccagagtgaagccaaagatcctggctgggccctggcctttcttcctcttgagaagggagggtacccgggaacccccagaatccagcgtcacgccctgcaagtgtcctgccacctatggatcacaggaagctggatccaggacagctcattccacgtgcactatttttacaaaacagaaaatgcaattgtattactattagagaccaaggggacagaatctgggctagtctagtaagatgttgtccatgggttcctaagtcactaggaattatgtgttaaatgccagtaagtcaagggtgcatctgaaggaccagggtgtgttttgagaagggaccctccgtgccactggaaacatatccctgtaagctccttccacgctttcctttccaagtaaagtttactcagtccctctgctgaagaaaccataggttctaaattagtgtaattgaactgacatacttttatgggacaaatatgttttctcctttgcacttgaatgagttcacacccccttaagcacccctcacacacaggtgcatgagtgcacacgtgtgcacatacacatacacacacacacacaagcttcagaaaccctgggagccagatgagtaatagtaacaaggtcaaagtgaccaggcctgcaacaaacatggcgggactgtctactccaggccagccacgggcatggggcagccccaggctagcttaaagcctgtcccctcagactcctggctctttagcagaaaacccaggcctgagtcctagctctgcctcttactagtcgtgtgacccttggcaagtctctgaccctctctcctcacctgcaaagaaggacatagcaaggaaatccccctgccctgctgctgggagagccggagggatcacagaggaacaggtggcaatggaggtgctgagcgctgcccatgtccaggctggtgacagacaaacaggtttcttgtagcacaacaatgcaaagagtcaggaatcgggttggaaattgtgagaagaggagcagtgctcagacggggagtgaagggatgctgactcagtgggcaccacctggtcctcctcgactgtctccattcagaaaagaggttggcagggctggtccagaaaccagaagccgggctctaagaaagagcttccagagaacaagatcggaagccacacaagggccatcagtcacagggaaaggaatgctgaccccaaatcaggagagctaaggcccattaagtcccatcttgactgtgccactcattggctgagtgacactgggcatgtcaccagcccctgtaggtcagtgacaggaatgggttcagcaagttacatctggctcccctccaactctgaggtcctaagggacccatggatgctccggacctgtgggtcacatccatgggaaacaacatcctgggagcccttagcagccacgaaggcaacctccctggggtggcgtagcaacacagagccagtttctcactcagtcctaagagagtgggccagggtgctgatgggggctctggagagcttagagtcccagagagccctaggcaccaggaatctggagataagagggctcccccgacccttcctcacagcctggtggcttccccacctctccccatcttcgtgtggcccctcccagggtagcagcaagaagcgggagcaaaaggaggggcttcaccccggactgggaattgggagagggtgacagccgaagccaggcacccccaccctgcattgcaggggcagtgtgcaggagcacagtttccctgctgccactggggctgccagcccaggtttgagagcacattggggacaggcatcgctgctacaccttctcccgccaggcctagccatgcagccagcaggcctggttgtggaaaagaggggttgagaaaaattctagagatgggccatttgctggtgaggagaaggtggagcgggttcaagaacttggggttttcctgtagcttaatcctggctgcccatatggggccattgagttctgggtcaaggagtgctgaggtgaggagggggacctggaagctggccccgcagccctagatgttgcatctcacccttgtcacatagtgtgggttctgggaggaagccagagagctctccagaagggacttggccaaccttttatcaggaaaacacctactccttaaagaggacaacaccggggaaggggtgtcagtgcctcacctctgaccccgttaggagcccaggcaggcttcccctgcatctgctccctgccctccatcctctcctgggaaggccaatccccttatagatcagggtattcaataaccacagttccctcttgttcctgctttagccacaatgagcaagaggaaaatcccgttgctggcaagcagcagtgtctcaccggccatcttgaccgttagggtccggcgtggggatcagccgctccctggctgatggggtgaaatgaaggcctgctgggggctgcggggaggtagactgagtgggcaggaaacagcctcagcccagacaggccccgggcagcccaggctggaatcttccacggatggaggggaggctgatgccaggagatcctctgggcactcctcacctctccctccagggcctgggtccaccccccagccctgccctgcctggcctgcttctctgggacttcacccacattcatcctgtcctcactctgggggtcagatggttctaagcaggggcagtgtggacctcaggcctcagctgctgtgacactcactcctaagaccctaagaatctgccatgaagttaccccgttcctcctcagggaatcagtatgggggctctgcctgaatgaccaccaaccccaccgcccactgactctctgccccaacgattccacctcccctaggccctggtcagccgcatgccctctgagccactctgcccacttctctagttcctgccacgaagccctgatttctgccggctttttgcacaatgcccccggtaatgtgccaggaagctgtgctgtgtgacagagcacaggctccactcacagctctgctattgggaacccccctccccatttgtgagatggggctcaaggatgcctcacagaagtgccaggattgagtgaggtgcacctgcgagtcatccacccctgtgcctggcatgtggcaggtgctcagccagtgttcacttccttcctcttcactgactccatgttaccctgatgtcaacttctaccccgagcagcacctgaccctcttgttcaggtgctgtccaagcaccttctcagctcttgctccccaccctataccaagggctctgcagaagctgcccacacaggagccttactggcccaggggcaggtatagggagctcatttactcaaagttcccctcacctccccaggctctcagtgttgcagagatgtaatgaatccctaacctcatgggcgctccactctcagcagcacaaaatcagtgttccagacccttgcatggcagcgtatgcctgccctagtctctggagagaaagtgacttcggccctgaccacactcacatgcacacacatgtgtacacaagtgcccatgtgtttgcacacactcacatgcactgcatgacaccagggaggactctggattctgggctctgctgttgatgctgtctttaggagtcacatcttagagaggacaaagaaagaaatcccagctttagtcttgcagctaaactgtagagacctgagcctttcctcctgagtcccagtattctgcgactatctcctcttctcattttctccacctggcctggctctcctgccctccacgacccccacctccttctgctgcccaaaccctcttctgctggtctcctctctgctgggtctcatctgggaggagtttggggcaggagccacttttctcattctccttattgatcattcttccactccagtggaggcctgcagaagccaggtaacttcctcctatgctggggccagagggcagtggggcacgtgtgcatggtggggctctgagacagaggggcagagagtgggcatgcagaagtgtgtgcatgtggggccagtacatgcagccttaccccaagagtgtttttaaatcggtttccacagcccctagagagctagaaaatcctctgctgccttccttctccaggctgagccccagagttgcagcagctcccaaagctgctcagatgagccggggcagccgggcgcactgggattttgtgcttgagacacattcctcctcctatgctgtgagctcttctccgcttagtagtctcagctgatgtgggcagccgaggcctggctgatgttaacacctttgaattacagactgacctgcttgcccaacgtaaaggttagctggccagcgctggactgcagctgtgctgtgtctaggccttcaggtcttgagccatcaggatatgcagtcaagtctacctgggcaaggcctgtgccagaacagggtgtgaggagaggaataatttgctaattgttattcactttcctgtcttcatcctcattgccacagcactgggaaagcattgagagaacattccagaaaagttttctggaagcctccctaaagtgagataggggggccgtttttccctgctctgagccctggagtggtagctcacttaccgccccacctacacccctagaactgcccccaaccacccgtgtgcactccatagcaggacccccagccctgcctcaccctcacagagcaggcttagcccactgttcccctagaggcccccagagcctgggagctcccaccccattggaggggagcaggggagcaggggagccggtgggcagaggagcagggtggcccaggccgggagggtggccaggctcatctaaccctgtgttccctgaggaagctgcgacccacattgtggaatcatcagatcttagcctggtaggggcgatgagctgaggccctgaggtatcagagcttggggttggaatagtggccacccaggcccagcactgtgggcccctcccatctcccccaaggcagaacccagggccatgggaccccttttctgcagacctaggcttgctaccgtgcgaagctgtggggtgagaggtctgtgggacaaggaggcccccggggagcgtgcaggcccgtggggccggggctgaggccagtgtctctggtccacagcccctcacacgtgtccccttgtctcctcatttcttccccctactcagcaaaggcagagagaagaccaagggaggcagagatgacgagcacaagtaggtgtcccaggcgagggcagacgcaacagcgtctctggggagacagaggcctcctccccacaggctgtggagggcgggatgggctcggctgagagggctcaggagtgggctgtcgtggtagagctggcacgggtcatggaggcccagggaggccttttcacctggccacgggggtgagggatgaggaggggttagggtcgcgggggaggtggccagaccttctggtttccactctgggctctcgggggtgaccatcctcctctccgtgtcttgttcctcctccactgttcagcccccatcctgtggccttcgggcttccctgggagggaggggacagctaaaggctaaggggagaggggcatgaggacctcagggatccctctcccaacaggggcgaggtagggccaggcagctggaggcataaggaggaggaactctgggtaccctttgcagctgcaggtcgtgggtggagttggagacccccagaaagcttaggagaggccaccatttgggcggccctctctatcttcatctccccaaaaggcttcctggaaaaatgaggtcagggtgctgtctggagaggacaggagaagggtcctgcaggtgggaggggctggtcacaagggtctggaaagattcgaaggctgggagttgtgaatgggtcttgtaggcacccctagaagcacactgacatctggaggactctagcattacgggatctcataagggcagtggtagccaaggtggaccatactggaggaggcctctggttaacacctgctcttacagatgacaaatctgtctcagaacaggggcagagctggaaccagaagacagggaagctgacttctgacccagagctcaccatagacccaggaaatttagagaacttgactgtatctaaatttaatctaattctccaaacataccaatgagagctgaaaagccaggagtgtggtcttttttatcttccagataagcaacctgagccccagagatcttaagagatttgctcaaaactgtggcctcaatatattaagaattagttcatctgaagatatcatggaaatatcaggattgtgtgttgaggggtctgaactgatcaacactggtgtgggcttgggatatccactggcattaagatcctggggaactcacagcctcattcattgcttcaaaaaaaggtatgagttctaactcgcatttgttacgcacaagcaaaagcaatgatgatgcagtgttaactctgtagtgatggaggaaatggcgctgtgtaggaagagctccagcccagagacctgaaggatggaggagtttgccaggttcccagtaagggaagacacgtaggcagagcatgtgtcaaggctcagagccagggaactgaatccagggtgggtggcgatgatggggaatgctgagctggggagtcctcttagggagtcctcaagggttcaggtttctccatagatgcttagatgtaaagggcatatgaatgagatacaagcagcctgtccatccccagcttctctgcctgagatcagcgatgctctaaggcccttcttgatgcccagcttcccagtctgtcccaggccagacccacagggacacagactggcctgatccctttgactggctacagttggagtaagaggtacctcacagtgccagcacatagtaggtccaccaaaatactggtttcctagcacttctctgtcctaatttcttaccatctctaattagcacatgagataaagtaaactggcatatagtattgttattattattatgtgtagagcaataggactattgaaagaataggaaaatgagatttctaagaagagattgaacaaatttaaactctttagcctggaggagagaaaactgtggagacagatttcaatctctgaaatgttaatgtgtggcaaagctggttggtatctatctccactgagaagagataaatggaaataaatttaagttgaagttaagttgaagtagagaaacaagattcaacccacgaaagaactcatagtgtgtgacattctgggataggctggtttggggagatgagaaaacacccatcatcttccatgatgctgcttgcttgagccttgcaaagggctgggccgccagcaagaactgaagagccagcttccctgacaatcctggggtcaggacaagtgtgtgtgggtcccccaagccttctggtacaacgtgggcacatgtgcaaacgggccagtttggagacagggtggttcttgtataaagggtcagcctatcctgcccacctatggaaagctattcaaaaactaactgacattcaacacactttcaaagacacctgtaaagaccaaaattatgaaattccctgtgccttggggcatggaaaatttttaaaataaacccatttaggggcgcttggataacatgctccgaggttttgaaaattgggctgtttgagcaatgcaaagaaggaccacagaccctatttctcatagacaggagtctttatcctgattgattacctgaggcctgagctaatgagcctagtagttccagttgaagccagtcatggggcagaagccctgggcagtgaatggactcgacctgcagctcatttatggtcaggtctctattagctttcagaataatccagagacctgaattaatgaaacactcgggtcactaaatttagtttggtgaatgttcccaagtcattatgaatactaagctctacctaggaccctgtgtgcaccacacagcaacacgcttctaaatctgggccataaaatgagcggagaaatcatcagatttatagtttacaataagtgaactaattttagcatttttttcctctagagataaataccagtctagattgtaggtgcatttcattctgaccatggtgaatgtagccacaggaaactcaaacggattctaaatcctcagagggtcctgggatactggcctccccttggctctcacttctcaagctttaatacgcccaagaataaggagccatttgattgtaaagtgagttttcactgagttgattattggcttgttttctttgtctgtttctcaccatatcctgtttttggtaattgtagaactcaactagaccaaatgcagaattttactttgaaaacaaaaaaaggccaggacaacggacacctcaacagcaaattacattttttgaaatctaagtctttcagacaaatagataatcttcaaaattccctgattaagttgacatttatttcaaaactctcctttacagtttgccaagagaagtaggcatactgctttctgggaactggtgctgcaatcaggcagaaaggctttttctatagtgaacttctgatgtgttactgatcagaaaattacaaaggctagtggcagtgatgacatcatgctgtactgatcacaattcagattcattgaagagcaagtctaggagaatcagaggtacagagcctgtagtaagaattctggaaattacatccttcactacacatttctgcatttttaataaagggacaaagacaatatccttttgagatattcccaggcacacaggagtgctaccagtactaccacttcagacagctaaaactatgcagggttggaagggagagatttctcctttcaattgcttcaaggtgtagtagagatagttggacaagtatagtttttgtttgtgtgtttgtttgagacagagtctcactctgtcgcccaggctggagtgcagtggtgcgatcgtggctcactgcaacctccgcctcctagttcaagcgattctcctgcctcagcctcccgagtaactgggattacaggcatgtgccaccacacccagctaattttagtagagacggggtttcaccatgttgaccaggctggtcttgaactcctgacctcaagtgatccacctgcctcggcctcccaaagtgctgggattacaggtgtgagtcaccgcaccggaccaggacaagtatagttttttaaagcctcaatcatttctttcaaatctgtttgtgttaagaaataaagtgactttcaaattcaagggccataagtgccccagggatgcctcaggtccttttccacctgggtgagtccatgggaccagcctctgaaagccactatttcttgctaccttgcactccccccgggactcaggcagcagggccagatcccatcccagcaggccgggcagccggcttctccaggcagggcctgcttctaacctaccatctcagagcacttcccctctggggaagtggggaaggggcaggggagagggaagtctgtggctggagcaggctgcaatggcaaaggctaactatgtaggtcacacatgcggaagggccaaggactccaagaataacacagcctaggaatggccaagaagtaatggtgcaaagtcaaacgctgagccctgcaggagactcctgggtaattcaggagagacatagttgagcagcacggctgggcaaaaaggaatcccaagcactgagacaggaagtgacccacgaggaggcccacaaaaactacacttctgaagctgggcctatggcaggggtcaggacagccagcacccctgtccttggggccagcaggtggggcaaaatcccacaggatgcttcagggcaagccagccagggtggtcctttccccaccatcacacgattatttctggtgggttcattgatctgttcaatgttatgtcaccagcaatttaacatgcacagcagtcccttcccaaatgtttgggtgctcaggttctttttgaatgagccccttctttgtaaacatgggtatgatctgtgagattccacagatgacagcatcctgatctgtaaactatgctggcacacagaccatacctgtacctatgggtgccagccctggggccttttagctaaaatcccaaatggtcaggaatggatgggattcttgcccacagaaaagtgcagtcctacggcatcgaggcaaaggacctgagatgcagtaaaaatattgctggcctagaacacaggagctttctgcttcaatcccagttctgccactcaccgtgtgacctcgcgattattgtcccctctctgagcctcagtctttttattggttgaatgaggagaagtatgtggccctcagaggattgccaggaagatgaaatgagcagacatctgcagacattgcagacatctagaaaggcctttggccctatgtagtctctttttggcctgtatgtgtgtgtgtgtgtgtctgtgtgtgtgtgtgtgtgtgtgtaactcacctcccccatcagaagggaggaagcttttgaaaataattccaaaggcatcagctttgattttagagcctctttctttccctttcttctcattgtcgtatttcagatggtatgctactgaagagtgcagacacatcagccttcttccattcctttttaggaattcaaagaacatgctaatgttccctaaattgtgagctgctgccacgtgaaaagggtgattctcaattgctccctcactgggatatgaacgtgctttgtcctgcatatgaacagtaaagaaaggtcctggggttgggatagggccaggtttggggaataagattggccccacaatcctgaggagaggggcttgaggtttctaggtcatctgcctgaggacagaaaggttttccccaacctcctattgcccagcataaagaacaaggatctggggtcttagaaaccatagtcaagcctccacagggagatgtgtgacccaaaaagggtggactctgctgtaagcgagctccaggttggagcctacacctggctccacctggacctacaggatgatggggccatacccaggaggagggagaacgggaagtggagagagtcaggtatccactcatgcaatatggatggggtaatggaacactgcactttaccctctgctgatcctgctcctggggcttcctggtgccaggaaccacaggctcggctgcagggacatcactgaaggacagtgaggacccctgccccttttcctcagccccgctgactgcaaggcccttcacctgggggcacaaggtcgcagcaagccagaggaagaggtaggaactatggagcctgccataagttcctggggttgggggaaaggggaatttggcagtgagaggggacaggtagaaggggcaaaatccaggaccgaagatagatgggaaagggcctatctccccctttttcatggggaccaaggagcatcccagaacacggagaggttggagaaagacaagtcaggctttgagcaccagggccatctgagaactgaacagctcgtttcaaccacatctcccatctcctcatcggcctctgcccctgagtcctctctggtccctgccccgccgttctgatgctctgtctccagtcctcgggctttctctccaaccagctgagccggggaggatgagcgtggggacactggcagggctcggagctctgaggagactagactgaggggctgggatcagactgaaaagtccaagacccagaggagctccagttaaaacggctctttccggctcaagaccacgttccctgcttgctggggaccccatccctctcctccgtgtgtgaaaggatggcaaaggcggaagtggaggggtctctcactgccctgattccccctcctggctcccaatttgggaagacagatcccgatctgtctcgggaccagtaggtgaggggccgggtccatctcccttctctgatgtgttctctcatgtttggctcttctgtgtttgtgtgttttcctccatgcgtccctctccctgcacctcattctggtggcccccctcacagagccgggaggagcgtgttctccgccatgaagctcggcaaaaaccggtctcacaaggaggagccccaaagaccaggtaggacaggtgccgcgtgagccccgcagccccgcgcctcgcggcgccctcccgccgctttccagcccctgcccggctgccaaaaggccctcctgggataggtcgtcccagggccaggccccacccagtgatgcgtggccctctaggaaggagacgccctagggccgagggagggaaacgggcagcgccctctgtcgggggtgcctggttacaaggctcctcccgccctcgttgctcccggttcttccttcttcacgcagaagcccagtgttttaattagagcagagaatatccatcaagaaacgctgtttggccaactccctatttctggggggaaaccgttgtcccactagtacggggtcggcggcaggcctcgcccaagcgctctcaccaggctgcagcctggcctttggggaggtcctggggccgctggagggcgcggcagggccgggcctgggaggctggagcagcaggtggcactgggccctcccggaggagcgactggagaggggaagacagctgctgcagaggaggcgggaggcctggaggaagacaaggggagaaatggagaggacaggggagctgggagggggccatcttctccatcacgggcccaccatcggggctcccggctgccctcccccagcatcccctctgtggcctactggccctcaggctctctcccccaccctcttgcccccatgccaattccagccgtgcccttcaccttcttaaatggagagagtacagctgctggctgaggaccaaacccagcatccttgggtggctgttcggaatccacatgtctgcatctcattagatgaatacacaccaatgcattaggttctgaattccatcagctgtttgatatggataagttacttcctaagccttcgtttctgtacctgtgacatgagaataacgcccatcttggcagggcacagctctaaggactagagatagtcatgtaaagtcctggtgttgtgcctggaacagagagtatccacccaacaaatggtagctatttattgagaggtgcaaaagtatggattctttattccctaccttcttccataagagatattcagtgcctaagtaagtggtatacaataaaagagcattcaattaaaataaaaaggcaagaccagacataatggccattcaaatccaagatcgggattaggtagaaaaacactgcagttattcaggccataatattctaagcggtagcaactaagtaaacctcgaatttaactctcagctttctggatgccagagtaaaaggagaaatggtcactatctcaccatcagtcagcccacctaaccagtctttcatcttccccagatgaaccggcggtgctggagatggaagaccttgaccatctggccattcggctaggagatggactggatcccgactcggtgtctctagcctcagtcacagctctcaccactaatgtctccaacaagcggtgagtggacgggagccctgcaaccccagctgcccccaccctgtcaggcaggacctggcttgccatgattggaatttgggtagggaagaatcagggctcatggacggcttcttcctaacctaaccttacccttttctgcttttccttgggtgtttttctcacctctctccctgcaaaagcagagcacagcagctgcaggcctgttctcaggtccttgaatacctcccagcccaaggaagccacagacctgcccaccccatatttgaacctattgaccccatgtctgtctctctgttacttctgcctttgattagttctctgtgttgaggcctctgaagacaactaatcctcactattcttggcagtgcttgagtgtttaaagaccatgattctgtccctctgcccactcccaggtctaaccactgccagtgtcctcctccccaacaagcagtccccataccccaggcctgatggtacattctcttcctcagatctaagccagacattaagatggagccaagtgctgggcggcccatggattaccaggtaggtgggcacctggaggcctcatgtctttcagactctgctctagtgggggattctagccggatgtgcattatccactatactgaggcatggatccaggggtcatagagaacaacaagctgaatataagttcccaaagtaagcttgttcctgggaggcattcctagaagtatcatcagtagagagatacaaacccaaagaaaagcttgagaactctgcctatgctaatcaaagcccttccagtatttcatgttcagtattggacttcataaagtgagaagcacctagaaaaaccataaagagaccaagaactacaaaaaagtattcaaacagttaaaataagggcctttgaagaaagttttcctggcatgatttttaaattgttgttttgtattatttgattgctggaagtaatgacgattctgtttatctctggatggtgagactgtgagtgatttttttcttctttttgcttctctgtattttctgagattaacacaacttttttatttgtgtgcttctaagaccagagacaaaagactgagacaaagagaggttgacagctgtaagaatgtgaatgtggccaacagtgcaggcaggacaggtgatgagcatgtctggtggctgctgggacaccatctctcaggaagggcccagggaccctccattgctccagaccctcccttggaggctaacaggactcagctataaatcagaagactgctgggctttcctaggattgagttagaatgctggctgctcagaggggacagggcttgcaagagatctcacctggctgccactgcacttctgtcctggggatgttcggtctgggtatcagcaccaggccccagaatcagagtgagccccatctaccagggtagagctttatctctgatgcctagttccagaccccaagcacactaacccttctttacggacaaccccacctcccctcactcaggtgatgatggaaaggataagatggcacttttctatgtaaaaggtacatctggccatgttttctccagaatatacttcatctcccttcatctttgttttagttagtttccatctactcaggcaactgtcttcccaggtgcctgaaaaacagccccaggcaatgtcaaacggacctgcccctgtggttttaaataacttcaagccattggattccttaggggtttgagaatgccggcccctcacctctgccaaaacccaaacacaaagtgtcctgagacttccgagggcttttccaagggattgggctcagggctttgtttctctgtgtgctgagaactggagaattccaaagaacaacgaccccaactcaggtatcatgtcactggcctaagaggtaaggacacatcaaaaatagagtcattattgttcatgaaacttatttttgaaggtttattctatgccaggcactgtgctaggagctatatatgtatttccattgaagttaatgtaattcttcaaccacccaaatataggtgttactgcatttataggtaagaaagtgaggccccaggaaggtcaggaacttgtcccaggtcgttgccactaagttagccaaggttagagccagggttcaaggccaggggtgtctggccatagccataagagcaattgacttctctatatcaagccttctagacagctgctcccttcgggtccctggttcatcttcatcttgctacttagtgcttgttttccaaaccttttcaaactgcctcctaccagagacttttattaactggaccagacattgtcccctccaaagactttttaaaccgaactgaacaaaacggttgttgtatttaacctggtagcatagtgtttcccgacaagttcattcacaattaaccttgcaaacatttgagtgagagctatgaggatgcaaatgtgaaattattttcacttccaatacatacagtgtataatgcaataaaagcaggccgggtgcagtgactcatgcctgtaatcccagcactttcagaggccgagatgagtggattgcaagaccagcctggccaacatggtgaaaccccgtctctactaaaaatacaaaaattagccaggcatggtggtggcgcatacctgtaatcccagctacttgggaggctgaggcaggagaatcacttgaacccagaaagtggaggttgtagtgagtcgagaccgcaccactgcactccaacctgggcaacagagggagaccttgtctcaaaagaaaattaaaaataaataaataaataataaaaagcaataaaaccagatacgacttcactctcttggagactttgggtttgatgagatataaagaccgcaggaaggacacctcgttggtgagatgtggggagacttagctgaactcagatccaggaagggttgtgagggctcaggaccattctaaaggttatggcactgaaagaagcctggaggtaaaaggaccgcggcgtacccatgctctttgtttcttccatttagaatgcacgtcacgtgtaaactctttcctgattattgccatctccaaggcaagaaaccacagtcacccccctgtgaatgtgcagtttccccaccagagtgagcaacgcttggcacttggcagagatgttcttggtggatcaaggggtcttgagtctctttattaccatctcttcctggcaccaagacttaatacattgtcacccaacatctctccagttttcacctccatttcatgcccctgccactgacctgaggtccccagcctcaactgcatggttgtacctactttctacctggtctccctgccctcatattgcctcctccactccaaactccatgccaccactggagcaaacttctgaaaatgcaaatctggtcatgtcacatctctgccacctggaaaagtggggagtgggtaatggatgttgcagaaggacagtactaaagggcgcaccaactctcatctctggctcccagcagatgttcctgaagctggatcaggtccctgggaagcaggtcacaaagcattattactctcgggttttcccaggacaggggtatagatttaccactcagcattattccttgtgatcgctttcatgaagccactggggagtatgtcccttatcttgaaaggagatggtggaatagtcagctggtcagttggtcccagctgtggctccgtttgcctcttcatcttccaccctggaaaaattgagtcctctgctgatgattggagagaaggatggccaagcccctcccccagaaccctggagaatgaccagccattttttattttttatttcaagtgcatcatttccccttcctagagccccaggaggggtgggaggcagcaggaatggcattccccttcccccaacaccatgcgcctggtggtctttctccagcgccctcagcttcctctcggggctgcccttcaaccagcaatgagcaccctctggagcttctcttccctccgttgctccttcaagcctctgcccaccttcccctccaccctccgcctctactgccagagcttctgcccaggttgtcaccttcactggctctgctacatggaggaagggagaaacgtatgaggcctgaaaagggggacagggagaagtagcctgtcttatggccatgcctcgagatggaaaacataaaaaccaaccactctcttggcagtgggaagaggacttgctgctggcttatcttcggtagatgccaaaactatgtctgtccgcttcccagtcctgagttatagaaagccttttttattgttggtgggggcattagttgtggaaaaattcatggggtttttaaaaatctttggcaaaaaagggttcgtggaagttaaaactctacaaactattgtgcaaagaaggacttctagtgtccgtttgctctcttcatagtaaacttctcagagctaagttagttagtcctatttcctttttagctccctgaaggagcagtgaatattgaacttctgtgaagctccagattctaagcttttacttccgtccctttgtcacttcacgttccaaacggaaatgtttgcttcctagttcaagtgtcacttcatttgtaaatatcccctttcctggcaatgttctcattaacattggaatttctatttccttaacatgattacttctgatgtgtagatttttaatcaccctcaggttatttttcagactttgatggacactggatgatcattttagtggttattctttttcatggaaagggaagataattctctcaagtaaagtcgtatttagaagttgcatcaaagcacaactaaaatatgaaatctccaagatgacaggcatgaaaagcaaccttcggagtcgcattagaagaatgtgccgggctcagtggctcacgcctgtaattccagcactttgggaagccaaggcaggtggatcacgagggagactgagaccatcccggccaacatggtgaaacctcgtctctactaaaaatacaaaaattagccgtgcggtggcaggcgcctataatcccagctactcgggaggctgagtctggagaatagcttgaacccgggaggtggaggttgcagtgagcctagatcgtgccactgcactccagccggggcaacagagtgagactctgtctcaaaaaaaaaaaaaaaaaaaaaaaaaaaaaaagaagaatgtacagaggtccatgcttattctagctggggaaaggcttttcttgttaaaacacacgtttgagagaggcaagtgaatcaatcattctaagtatcatgcacaagctccctacttgagagatcaaccgcttagctgaagggagattctgttggggtcactcacattttgtagagctttctgctgtttaggatgcattttgacacacatgatctcatttaacctgcatacaaccttacaggtagctggtgtctctgcttgtaactgaaaaacacaaggctatgtggtcatttgccctcacacctggcaacatgtcaggtctggggttcaatcccaagttcagcaacccccagtacatgcctctgtctatcttaacatggccaccctgacaggaactgacacctccaaatccaaatgagacctgatggcttaaaatgagggttcgggaaaagtagtagtgatgtcaaaaattactggtgctctggctctctctctctctgtctctctctctgtccttatatctttttagcttaaaaagccaataattggctggtcacagtggctcgtgcctgcattcccagcactttgggaggccaaggcaggcagatcacctgaggtcaggagttcaagaccagcctggccaacatggtaaaacccaatctctactaaaaaaaaaatacaaaaattagccgggcggggtggcatatgcttgtaatcccagctacttgggaggctggggcagaagaatcgcttgaacccaggaggtggaggctgcagtgagctgagatcatgccactgcactccaggcctgagtgacagagagagactcagtgtgaaaaaaaaaaaaaagccattaatcatttgtggtaagctccacaaggaagaatttgttgcaatcccacctgtgcctggctccagcaggtttccaggaaacatttgttgcatgaatgaacaactgaaatagggcttcccaggatataagtaagattgcagagctggacgccacataaaggacacagcagagtgcacacaacatacaatcagtaggctgaaaaaggcggctcaggcaggcaccaaagccgcactggccatacaaacaaagaaattcagcaaacaatgtggaaaggggggggagccaaattccagaaatgcaaagacgtatcagaggcctgcaggcttacatgagaattcctggagcaggaaattaaatgcaagttaatgaagactttgaaagctttattcctgagtgcatgaaacctgtgacatgggtttggcagctctttctgaagcagagccatcgacgctggggaagaacgcagggcacttggcatcacctaggagctttaaaaatacagattccagcctgggcacggtggctcatgcctgtaattccagcactttgggaggccgaggcagacagatcacttgaggccgggagtttgagaacagcctggccaacatggcaaaaccccatctgtataaaaaagacaaaaattagcccggtgtggtagtgcatgcctgtaatcccagctactcaggaggctgaggcagaagaatcacttgaacccaggaggcagagggttgcagtgagccgagatcatgccactgcactccagcctgggcaacagagtaagactccatcaaaaaaataaaaatacagatgcctgagctgcatgtccaggattggattggattggtctggaggtggcctgggcatcagtgtttttaatgcctctccctcccttcggcccagcaagttaagtctagtgaacactgacttagaggttagccaactcatactcctctataaatgaagacacttgaggcatagaaggagaaagagccaggatcacccagcagatgagaggcagtggtcagaatggagcccaggaggccagtgctggctcccgggccctccctctgaccctgctgccccagcccctggacccctgcgggaccaggctcctaggctcaggcagctttccttctggctcccccttctcctgcctgcaggtcagcatcacggtgatcgaggcccggcagctggtgggcttgaacatggaccctgtggtgtgcgtggaggtgggtgacgacaagaagtacacatccatgaaggagtccactaactgcccctattacaacgaggtcagtggccctgtggggaaaggagcctctgtaaatatggcaggagggtggccccagccctccccaggagaaataggagtggctggaagtcaaggagcacacagggctaccagcaggggtgatccaccctgttacaacccccaggacactgacaaacagagccacatcttctgaatcctctgaaccccccagtctagagcacaggccgacactggtctttgaagcgtacaccacccgggtgctcctgggcagaccccagcagtgcctgtgaaagaacccccccccaccccactccccaagaggcctggttcccactgtttcccaggccagagcccaaggacagggctgcctcattccaacccatggtggcactggcaccattagtaagcactttctaccagccaggcatgctcctaaatgcttctgaactggaccatccaaagttgtcactatcaattcccttttacacaaggggacagtgagacttctgaaggcagaccttgtccaacctcacagtgccagcatcgcccttggcgtgctagtggggttctgccctcttggctcggctccttcatggttgcctaaacttctgcgggcttctctccagagcactggccttgattttagggtgtgaaagagaaaacatttggtacccactcctattctttccagccatttgaggccacatcaagggtgagggacctcagagaccttctactttaatctccccatcttacagaggaggatactgaggcctccatatggaagggccttgcccacaatctcagagagtgttgctgatagagcaggggccaggctgcccacccagcttccagcccagggctctggccaccatcacaaatatggcaccttggttcccaggctccagatgggaccccatcataatcagctctggggagggatgtgagaaatagagaaatacactcactcatcaaaacccaaagaatgacttagaggcatgaagaacagcgaaagtgagacttttaataacggtcttgcaagatggagtgtctggtaggcaggcacccctggggcagtcacaacaggaatttatctcctagtgtgcaagtccctcccccacttccccattggttgagcactatggggttacaatcttccctgacgtcgcctaagtttcattttcccccttacaaggttataccccgctccccttcgatttccccacttaagtttcgatttcccaataacaaaactttcttccctttcatgggctgacccctcctctacattctgttcgcttattgtgtccttctaggtgcatgagccgtgtggtttgttgcattcgcaggttggatgccagtacttagacttatcctgccttgaaaatggaccattgaaaatgttttctcaccaggatgcccaggcctttcccagatgcctgatcacacatcagactaacccagaagccacaggcctgggccctgccatccctttcctggagggttccccagtctgtttctcctggtggctccaggcagtgaggggtgccaggctgtcccaagtaaggcagctgagtcccgtaccctgaggtgggtgagggctgaggtgccccctgtagcttgggggagggcatttctcaggcagctctgagagtcctcagactgtgcacctgcaggaagaaaacccaggcccacctctgcccttcagcccaggcctggccgaactctcctttgtgaccacaaattgactctgctctcccagctgctttcccacaggccccccgagctggacaacctgctcaggacccctccagccccaaggacattcaggattgacatctctggccttacgttaggacacatcctgactggacaagtctccgcctagataagcatctatgtccccaagacaggcatggagacaggtccctgtggccccggtggttacttgatagcagtgaagccacttctgctaacttaagggatctccctccaccaggcccacacaccttggctttcattcaaattacttcctctttcccaagggcacagagctgctctccctactctgtggctcccccagaaaactcctactcacccggcagggcccagctcaaatgttcttgctactgagcagccttgcctgctctgtctgggtcagaggtcagcactcccctttctctgcagtgttaatgtcctggagttgaggttggtcctccgtgtctctgtcctgctggtggactggaggctcccagtctcctgcctcgctatttgttcagagccaggcatgtactcggaggggttcagtaacactcacccaaaggaagacacaaacatccactgagcatctgccgcacaccagacagtggcacgtggggcaacatggaggctgccgagatgaaggaggcacagtttccgccctgcgcaggtcccctccttgtttcagcctagaatctttctaaattccctatttacttcctctaagactgactattcattctgctcatctttggacaatcttaaatgtgtttctgatcacatttttgttctttttcacaaacccaaatagctctgattttgtttctgtttcctctaaactagggtttctcaaactcagcactatggtatcttggactggataattgtggtgggatcgtcctgtgctgtgtaggatgtgagcagcatccctggcctctacccagtagatgccaatagcaactccccttagttacagctaccaagtttccagacatgccaaatgtcccctgaaatcgccctcagttgagaccaccattctaaactatcttactatgattccttccagccccaaatcagcctttccagccccaaagctttgtttcccttttcttctctttctatgccacattccttttcaatgaaggacatcctcctcgtcgtgggaatgtattatttctgactaattatctgagctggtaggaaccttcctttggctccattaaaacaacagagggaggtgggaacaatcaacatgacttaggtatctaagctattacaaaaggaaaatatgctcaggaaataacaggaatttgattgcagacagctcagagagttcgggattctggctctagctcagctagctcgctcccctggggctggcacatctgcgggcacctggcctgatcaccctgcctggccctgagcctgcctgtgtgcagggaagctcaaaacctttgcccttccggaacaagctggccattcacaaaccagactaaggctcctttcctgtgtgtcctgtgtgtgcatctggccccgccctgggcatcttgggagcgccaccatccttcctcctgctgaaaatccacctctcccctttgccttggatccttctctttctacagctcaaagaacctggcattgcacagcccaactctgtctttgtttttcttccagccccttcttccttgcctataaggtgttctactccagcatatgctaagtacaaccatgaagacccatgtgtgctcaaggacaggaactaggagtctgtcacctctctctgggcctttcctcattcccacacacttctccagtgacctcctttttccctccacccctccacagtcagaccacttgggttgtcctcacttcctccccccagtcacccctcaatctctgcagggtttctgcctccagatgtcattgacactgctctcctcaaggtcaccaaggacattgctgttcctgagtataatgtccatgtcatcctcctctcccttgatcacccagtttctttcatcccgctgcctgctgctcctcttgggggcccctcacgccactctcctgcttcccctgtctctccagctccatctccccggcctaacttcttggctgaaaggctgtgtcttcttggagccctgacctgggcctgcttcccctcccatgctctccccaggtatctcctccatctccaaggtgtcagttaccatcttgtgctgacgattcccaaatccatatccccacccgcctccccagagcttcagaactctggccagcacaccctgggcctgttagtgtcatgcacagctgtcgctgcttgctatgtgcttaccgtggtgcacacctgtgttaaagacttgaccagggtgtctcattgcaacttcacaaccacaccttgaagccccccaagtgaatggcacccctggagcagttcagcacgacagccctggatcatatctccacattcataggataataggtaaactgaggctcaggcaagaaagtgagtgatctagcagtaacagccaggtggggctggctctgaagctggctttaccctcagtgctcaagggccagcccccagcagccaggagcacgttctcttcggacatttaccccaagcacattggaaatatttctcccttctcccccaccacagttcaccaaagcagcagcccctctactcactgccccacaccctcatcctcagcacctgcacacccaggccaggggaagagatggggactgcaaatgtgcatggcagcccacagcaccaaaggacagtgcacacccatggcatttcacatcgactgccaactaagtgcttggcacaccatggttcatctgctctgaggcttgcgttattttacagtttcacctctctgaatttgggatgtgtctcctaggcagccttgtggcttcatggcaatgtccatgtggcttattaaaccgtagtatatcttacagccagtagccactttagatttggtaaaatatgttacactgtctcatcagagcctcataacaagactctgaggtgggtgtcattatccccatttcacagctcaaaaaactgaggttcagagaatgtgttgctcaaggccacacagttaagaaggtgcagagcggggactagaacccaggtctgcttgctccctggccctgtgcctcttctgagcacagtacaagggcatgggctgtcccacctactgttccaagttcctttcccaccccacactagccagcaccagccccacctaggggatggggctctgcttcctaccacccaccaccagggtcaatcaggatcagatgagttgcctctgctgctcctctgaactttggggctcagggcaaatgtctggggtgcagacaggccctgcgaggagggaggggcccaacactgcctgggctgttgctgctgccctcagtgacagcaggcctggatccttccccctccagtacttcgtcttcgacttccatgtctctccggatgtcatgtttgacaagatcatcaagatttcggtgagtggggagcagcccctggccggcagggccactccctcaaactgcacctttgtgcagacttgagaggggccccctctgtctagacccatgataaagaggcagcgccgtgcctggacacacggctgggcaagtagggacaggctggattctggcccccacccacccctttcattggatgcctctgaatagtgcattcgcccgtaaacagtggccagcaagaaactggcgtgggcaggaggagctgatgctgagcctcagtgagccaccccactctgccaacgccctcccacttcaccacaaagctcgggtcccaccactgccccatggaaagcctcacccttgctgggcctgacgggtgggctgtggttctgcctgaaaggtgattcactccaagaacctgctgcgcagtggcaccctggtgggctccttcaaaatggacgtgggaaccgtgtactcgcagccaggtgagtacctgcgcatggccagtcagtcgaggtgtgcatggctcagggagcgtggtgcacggggcccttcccactgtggcagttcctgggaaaaggctggcaaggaccacagtctggcgactgttagtacacacagccatctggcctgcggagaagtggcgcgcacagtctgtacacaaatgcagtgagcaactgcgcacccagtctggtgggttctcactcataattaggtgagtaactctgcacagagcctggaaggagcttcatcacacgctctggagtgcatggcaggctggtgcatcactggccataggcaggctgaccagtagtggtagaggatgcggtgagggagacccgtcacagcctgcagagaggctgcgcccagactcctgcctcctgggctggcacctgctgagcagaaaagaacccctttccacccctcacaggaccctgccgtccccttttacagttgaggctcagagccagggcttgccccagccacacagctggccgggggtgaagtcaggctgtgtgtccccagagcctcactgagccacactatccaatctgaaagcggtgatgctggtcaatgccagatgtagtgcggcggcctctgagggactctggtctctgaaaacacttcttacaagagccccaggcttttgggcagccatgtgtgctccgtggcgtcctgtagggtaacagcaatggtgttggcaagggaaccccaaggggtggcccagagggcttgtgaggtgggccaggcagaggaagtgcctcagcctgccagatgacagctcaccacgtgggcaggttagggaccaccctgtgtccctgaagtgaatgcactgctcagagtgctgtaatgaccccattaggcgctttgacagtgagaacataatttcacccaattgtcacattgggccctcacaaaacagtaatgtaggcagcagcatttcttcccattttgcacatgagataaatgaggctaagagaaatgaaggggcttagagataccactaaactagtaggttgaacaaattggcgatcgcttgtggttcaacctaagagacgtccagctggtgcacattacaactatgacttagaccagggaatctgagtccaaaaccaagattatacacataaaaatcacaagatcatagaacactcaagctgcccaagacctgaaaaacatctagtccagcctctgtgaagataaactgaagcccaaggtgatgaaggggtttgtccaccatctaggagtagcacccctgtctccagctcccaggccagtgcctttgccaccaccccacacatgccatagccctcagcggagggcagccctgctgaccatcagtgccatggggagcagggaagagtcggcctcctgccatgttgctttccaggaagcatgcatagccgtggactacttgcttggaatgactggcatccctgaggataagctcctcccagggctgagcagtggccctggtaccactggcaggcctgaggccgagagccaagagaaagtcagggggtggagaaaaaggcagatattagtctaatatggacctctgggcttctgggtagtaaagtcctggtgaggaaaccaccagggcatcagtaagtgccagatgttgggctaagctcactgtcccagcaggcctcaccctcacgaccccatataggcatcattcccatttcaccataaggaaactgaggctcagcaggcttaaacagctggtccagggccacattgtgagtaagcggcagaaacaggatgtgggccgaggtctccacttgggtaacctagctcgagatttgctgcttctgctgaatccagccctgagcctggtgccctcccagggacaggagagcctgaagtcacatgggtcctggagttgagacccaatgtctttactctgatatctccagtttggcctgaacttcttgatgagtcgttggttccagccagggcattgttggacagcatgctcccagagacactcctgggtgctgctgggaagctttgggtggtgtcgatatctcttggaactggaaggggtttcccgagagaacctcttctcaccctggcaggaccacattttgtcatttgtaccaccagatgcaacatcaggaaactgtttactgtttgctactctctgttgggggtgaggacgggccatacactcatcctcatagatcatagaggaagtcaggggcatacactcatcctcatagatcataaaggaggtctgggatgcagcaacttccccagctgggctacccttgactggcaggtgtcagccccaggctgaagggaggtgaaatgatgtttcaggctggtaagcatatagctcaggatctcatgtggtccttgtatctctagcctgagatcacacagtattaggactagaagggcctcagaagtcatgagtcaagtgttaacctgatgtagggacccccacagcaccatctctgattggtcctctaaccttgcttagtcctcccagaaatggggcactcactacttcttattttagatatcttcactttctttaggtcatctcaaaatctgtcaccctgtaaccttcacccactttcacacgtctctctttcaggacaaaaagaaaaatagcctttaaatttgaaggtaaattttacattcctcctgaaccgtattctctttctttgctaaatgtccccaattcatctaaccatgcacacctctatacatctacccctgtatccatccatccactcacccacccatctacaaatccatccacccacctgtccacagatccacccacccatccatgtatccatccattcacgcaccaatccatatatccattggtccacccacccacccatccgtgaatccatccacccacccacccgcctgtctacagatccacccactcacccatatatccatccatccacccacccacccatccatatatctacccacccatctatccacagatccatccacctacccacccatccacagatccacccacccatatatccacccatccacccacccatccatatatctacccacccacctgtccacagattaatggctccttctatccagtaatccattcaccatctgtccgtctatctctcagccggccaggcagctcaccacccatccctctgcccatttatgcacccattcattgagctttctgtccatctcctcatccgacacacatctgctctggcaagacctgaagctcctgggattcctgggacatggcccctccctggaggcctgccagcctggctgaggttctccagtgactcctcatccacgtgccttcctgccctctcaccttgcttgtccctctcttcagactctactgtggcattatcttttctgagacacaggtggcctggctattcccagaaaggccaacctctgtacacagcccctaacatctccgggagcccaccagggccacaggcttgcaggacacaggcctgggctacggtagaaggtggaagaggagggagtgaaggagggaggtgctgagtccctgagagttcagtgcccacctaacatcccgggaagcagattcctaaggcacagtgatgcgcttccctttgcttgcccactgggcttaaagtaaacctgaaggggcaaatccttcctaaagcgcctccttccctgacatccgtcctttcctccacacagtcataggtcatgggacactgggatgagactgacaatccctgtctttaggagactctcagtctaaaatcagagccaaacaatacccagatcagcacagtgagatgggaggtgtgcatggagagcacagagaacaaacactaaagagcccaggatcaactcttccgaggaagtcagggagggctgcatggaggaggagagacttgagcaaaatgagtagaagtttacaaattgaatagggagaaagacaggtggaggtggagagaacaggaatgagggcattccaagctcaaagagcagcagatgcaaaggcatggaggtataaaagggcatataaaaccgcaacacctgttcagcaaggaggaacacagggctgggtgggctcagcagagtgagtcagggagcactaaatcaggagcctgcaggccatgccttttgtcttcaccccaaggcactgggaagccccagaggggctgaagatggggagcaggagcatgagcctccacctgggaaggccctgtgtgcagctgtgtccttcacagctatgtgaaggctggctgactggggtggggccatagaagaggccacaggcagaaaaacccaattaggaggaggctgtcgtgcttccaagtcacaccactcatgggatatatgtccatgggcaggccatgcacccactgccccagctccagaggacctcagactctatcacaccctgggctagggacaggcagagctgtggccccaggtcccgggactctagggaccaagacagcatttggttctgccaccccttggcctgccctgagcactgggagacgctctgggtgggggtgtctggtgcagtgcccacccctcatcattgcagagcaccagttccatcacaagtgggccatcctgtctgaccccgatgacatctcctcggggctgaagggctacgtgaagtgtgacgttgccgtggtgggcaaaggggacaacatcaagacgccccacaaggccaatgagaccgacgaagatgacattgaggggtgaggcccagctaccccagcccctggagtctgagccagcccttccttcccccagggagcccccggtgagggtttgctgagagcacctgccacccgtctccctcaccctgctctcgctcactctcccaagcagccccactcttccgaggcagggcaggggcagggggtgatggaggatggctgagaatatcagtcctttgacatcctttctgccagtgagaaatgggttgagaagagtcgatgctggcagaccagaaccagcagctgctgggtcctgagtatagcagcaggaagtgctgggagagccaaggtttcttctggtgtgccaattccaggcagctgatagcagctgttgagaaatattctgtgaccttgtctggagtcagtgggtaaaagtgctgggaatcaatgaatcctgtcttttgtgagctgggggagagagagtggctactgtgaagtttttgtctacgaaacaaaagatacggcacaaaactataaaacactgacaataatactaagatcatatcccaatgtacaatctacaaagcactcatatgttttagcgtgcttgagccgatcatgttcttgggaggtgggtattattacagccacctcaacagtgaggaaacggcagctcagtgagatgggaagatttgcccagaatcccacaaggggcaagttccgtgaacacaagtgtctaatcctagccttgctccctcagctgtcccttagagactgtgccaggacccaggagtgtgtagatgccaggatgggggttggggacctggacctggtgaccatggccctggctgtatgtgctggcaggaacttgctgctccccgagggggtgccccccgaacgccagtgggcccggttctatgtgaaaatttaccgagcagaggggctgccccgtatgaacacaagcctcatggccaatgtaaagaaggctttcatcggtgaaaacaaggacctcgtggacccctacgtgcaagtcttctttgctggccagaaggtactggggtatgaggtacaggaggctggggctgggtgacaggtatcacaagggcaggctgatgggtgtggggcctggggcagctgggcaggtaagacaaggctggaaatcatgttggccagggacggacttagaggatcctcactgcctcctggagtccttagactgagagctgcgcagggggcatgagagggaggagaggctgggggtgtgggaagagtggagacaagtccacacacaggcacgcacacacacatgcacccactcatacacgcacgcataccaactcacacacgcacgcataccaactcacacatgcagacacgcacccactcacccgtgcacacgtgcacccacgaatacacacacacatgcacccattcacacacgcacacacacccactcacacatgcacacatgcacccactcacacacgcacacacacccattcacacatgcacacatgcacccactcacacacgcacgcatacccactcacacgtgcacacatgcacccacgaatacatacatgcacccactcacacgcacacatgcacccattaacacacgcacacatgcaaccactcacacacgcacacatgcatccactcacgcacacatgcacccactcacgcacacatgcacccactcatacacacacatgcatccactcacacacgcacgcgcacccactcacacatgcacccactcacacacgcacacatgcatccactcacacacgcatgcacacccactcacacatgcacacatgtgcccactcacgcacacatgcgcccactcacacacacacacatgcacccactcacacacacatgccacgccctcacctgtgctcccccttccaccagggcaagacttcagtgcagaagagcagctatgagcccctgtggaatgagcaggtcgtctttacagacctcttccccccactctgcaaacgcatgaaggtgcagatccgagactcggacaaggtcaacgacgtggccatcggcacccacttcattgacctgcgcaagatttctaatgacggagacaaaggtcagcagcgggagacccggtgtgctggggggcagagggagtggcctgaagggaaggaatatgtgagatgccctctcttcacaccaccgtcatcagctctggtcctcagcctcacaggtgcttccagggccttgccagcagcccctgcctcagggggagggtgaggatttgtggctcaggtcggctcagagctggcctgagcccagctgactggatttgtcagctagtagttgtgtgacctgttttcccatttgtaaagtgaaaataataatgattatatgatatgataattatagtatgatatgcacattatagcagtgtatatactgcatttgtatataattacagtgtgtgtgtatatatatatgatacctaatagtagtgcctatctgcagaatcgcagggattgactacctcctaggatccctgccctgtgctgggttccaaggacatagagtgagataagaatctattcctggatcaaagtgctcactgtgtattgaggagatagatgtgctaccaaatggtcaaaacataaggcagaagacacaaaaggccacatgttgtctgatccatgtatgtgaaacatccggcaaatccacagagacagaaagtagattgccggtttccaggtgctaaagggaggggattgggactaactgctaaataggtgcagagtttcttttgagggggtggaactgctctggaagtagatgatggtttatagcacagtgaatatacgaaaaaccactgaaatgtacactttaaaagggtgaattttatgtcatgtgaagtatatctaaatttttaaaatgctataagtgtgttttttaaaaaaaggcagaataaaaaggaaatgaaccaaaaaaactggatcatgagacccctgtcagaggcctgacaaatcttagccataagagaagggacttgtgcctaggaattgggaaggcttcgtgaggaagcagcatttcacaggcagagatggagagggatggccttcagcaaggaggggaggggtctgcactggcagggtcaccgtggtgggacagagctgcaaaaatggcacagggcccaaggtcatgctgcggacttggaaggactggctctgtcctacaagtagactgttgacaattcctgctctaagttccaggaagcagggagctagactttgccttcccactgcttccagctcaggcccccgcagggaagaaatagacccaagagagtgctccaccccagcgcagtgtaagaaggctgccccacacctgaatggcacacatgaagttctcagctcagcacccaggagctggaggccagggacccccaaaagaggcccctcttccccagggaaactggatgtgacgctgccccctcatttttgttcccactgccacaggcttcctgcccacactgggcccagcctgggtgaacatgtacggctccacacgtaactacacgctgctggatgagcatcaggacctgaacgagggcctgggggagggtgtgtccttccgggcccggctcctgctgggcctggctgtggagatcgtagacacctccaaccctgagctcaccagctccacagaggtgcaggtggagcaggccacgcccatctcggaggtgagaccccaggcactgtgctgtcccccagggcctccagctcagcccccttctccctgagtcacctgggtcccaggctttgcctgttgctgccctgtctacctgaggagtcatacctcaggataaggcttctccccaggaagcagaggcccccactcagccccgcaacaggactctgccctcgtccactgcctgcctgtgctctgtctcacaacggccgccaggtctcacgatggtgcctcccctctgcccctcttcccagccacggctgtccctgtggtgtctgcagccagccctgcttccatggatatccaggctggggggccgttggggtgtgggctgcctggccccaaagccgggtgggatgcccccaccatccacccccacggcctgtctgtgagacggaaggaggcctggcccccgacctgccacccttactcaagctcaggaacgctttgaactgcctccccacagagctgtgcaggtaaaatggaagaattctttctctttggagccttcctggaggcctcaatgatcgaccggagaaacggagacaagcccatcacctttgaggtcaccataggtgagtgctgggcccacgggggcttcgggcctaggtgagtgctgggcccacgggggcttcaggcctaggctgcaggtggtaagtgtgaggctctgcacctcagccctgtcctcactcttgtagggaacgttgacccctttcccctgagaggcctcaagcacccacaaaacacctttgtgtgtgcatggggtggaccacgccccataaaggggccaaccctcagctccacctacagggtgaggctgtgtttgggacctggggcagagggcagggagaagcccttcccggggctggagaggagagagtgggaactcaggccacagcctgggccagggctgggcctcgcactcaggcgtcatgaggactccctgactctcagcggagtggggacacgggctaatgctctctggctaatgatgtgtcacgtctgagccccattccctgactctccctctcccctttcccaaacccaaggcagcaccggattggacggtgggaggggcctggtggggaatgcactctaggccttctgggcccattctgctccaggcaactatgggaacgaagttgatggcctgtcccggccccagcggcctcggccccggaaggagccgggggatgaggaagaagtagacctgattcagaacgcaagtgatgacgaggccggtgatgccggggacctggcctcagtctcctccactccaccaatgcggccccaggtcaccgacaggtgggcccagcctcccatcctcctgtggcctggccctcccacctccctgggcccccaagacctcacctcccgcctctgcccaccccaggaactacttccatctgccctacctggagcgaaagccctgcatctacatcaagagctggtggccggaccagcgccgccgcctctacaatgccaacatcatggaccacattgccgacaagctggtcagggccaggccaggggccagcaggggtggggtcctgggggagacggcgctgtcagagggccttccctggaacacacaaagctggtctgcccagggggctgcaggaacggccccagcaggacctctgttcccattctcagccccaggtcccagggcacagacaaggacaggagccacctctagtcactcagcctccagtgaatcctggggcaggagtgttgggttccctgatttttccagaaatcttaaaagcaaggctagggagacaggtgtggtggctcacgcctgtaatcccaacactttgggaggccaaggcaggtggatcacctgaggtcaggagttcgagaccatcctggccaacatagtgaaatgccgtctctactaaaaatgcaaaaattagcggggcttggtggcgggcacctgtaatcccagctattcgggaggctgaagcaggagaatcgcttgaacccgtgaggcggagtttgcagtgagccaagatggcgccactgcactccagcctgggcaaccgagcaaaacttcatctcaaaaaataaaataaaataaaataaaacaaaataaaaaagcaaggctagggaagggaaatggggaaaagggagaagcgagcagtgtctgaagctcaggagctgccccctcctcctctgcccacccctctccccccatgagccatgggcactgactgggcgaggagtgcagctgttggcatgagacctccttctccccagcctggggaagcagggaccagcagataatcccgcccttccctgagctgttgctgttccctgttgaagttccctgaagctcagccagctcatattttataaaaatgaattaaaacctccaaaaaaatcaaggctaatatgaggtctgctcccagccccctgccaatgtcctccttgtcatccctgtcttgtgactataaccacaattaaagcccatagcctttgcagtgtgacctgggtctgcagttatctgcaaggcttccccctaaggagctggggtacaagctgacctgtgtttcctgtgggacctgggtctcacagccctcccagtgctctcagagccagagccactccctcttcccccaggcatctgttcccatcccctgccacaggctccagcattctggagtgacgtcaggatcttggcacatccagtcctagggtttccctctgtctctggccagccctgagccccgtagccgtgagttctgcccaggccctgtgagctcaccagagccacagactcacagcccagaggtggcttcttccttcaggaactgaagaacccccatgaacaccaacatctccaggttctgagaacagaacctgggaaattgatgacttcctcatgatgaccgatactcaggatggccctagcgagagctcccagatcatgaggtccctcactcccctgatcaacagggaggaggcatttggggaggctggggaggcggggctgtggcccagcatcacccacactcctgattcacaggaagaaggcctgaacgacatacaggagatgatcaaaacggagaagtcctaccctgagcgtcgcctgcggggcgtcctggaggagctgagctgtggctgctggtgagaagggaggggcggcaggtggggggaggatgaggcggaactggacaaaggggaccctgccagggctgggcagatgaggaagaatctacagagcccctgctggtcaggctcgctaaaccccggctcgccctacccccagccgcttcctctccctcgctgacaaggaccagggccactcatcccgcaccaggcttgaccgggagcgcctcaagtcctgcatgagggagctggtgaggacgcaactggacggcgggggctggagggagggcctggttgtgagaaggtgtcacaaccccctttgtcatggcccgagctgtcccccagttgctgggttcactgacaccccctccttcgcaggaaaacatggggcagcaggccaggatgctgcgggcccaggtgaagcggcacacggtgcgggacaagctgaggctgtgccagaacttcctgcagaagctgcgcttcctggcggacgaggtgcggcccaaggggtcggggctttgcctcatccagggctggctctctggggcccctcaggatcagggggctcaatcaggaggctagacccccttacccactgcccctggccaccccccaacccccagccccagcacagcattcccgacatcttcatctggatgatgagcaacaacaagcgtgtcgcctatgcccgtgtgccctccaaggacctgctcttctccatcgtggaggaggagactggcaaggactgcgccaaggtcaagacgctcttccttaaggtgctggagggggcaggatggatgggggcctgggtcctttcaggggagcagcagcccccacctggggctggaagcctgagtgacagggtggggccttcaagcagcaggtgctcagagaagagccaagaatgggaaggacgtgggggaaggggtggggaaggaggtgggggaaggggtgggggaaggggtggggaaggaggtgggggaaggggtgggggaaggggtgggggaaggggtggggaaggaggtgggggaaggggtgggggaaggggtggggaaggaggtgggggaaggggtgagggaaggggtgggggaaggggtggggaaggaggtgggggaaggggtggggaaggaggtgggggaaggggtggggaaggaggtgggggaaggggtggggaagggggcatgacggccccctgcccatcctcctgcctccaccggaccccagcccagcgggatggctgtgaaggggcagggcagctctgaccagggcctctgccggcccctgccccttccccacctcttgggccctggcagccgtcaggctcctggtgaccccatgcccacccccagctgccagggaagcggggcttcggctcggcaggctggacagtgcaggccaaggtggagctgtacctgtggctgggcctcagcaaacagcgcaaggagttcctgtgcggcctgccctgtggcttccaggaggtcaaggcagcccagggcctgggcctgcatgccttcccacccgtcagcctggtctacaccagtgagtgaggacccctcactcgaagcctcacctgggagggggccggaggggctgcccatcctggaacctcaggctgcccttccccacagagaagcaggcgttccagctccgagcgcacatgtaccaggcccgcagcctctttgccgccgacagcagcggactctcagacccctttgcccgcgtcttcttcatcaatcagagtcagtgcacagaggtgagggcctgggaggagggagtggctctggctttgagagcaccagaagcctgtgagcctgtggggactggagcctgtggggcctgtgagcctgtggggcctggagccacaggtcagccagtgccccggtttctcaggggaagccctgcagataactgcagcagacgcgggtcacactggaaaggctacgggctttagctgtggttatattcacaagacagggacgacaaggaggacattggcagggggcttgggccaaacctcatattagccttgattttaagatttctggaagaatcaagacacctgtcactcctgcccccaggttccgtggaagctgagtgagtaggggtggcttctgtttgtgcatctgcccccccctctgtcacttgtcccctgtctccccatcccatgctgcaggtgctgaatgagaccctgtgtcccacctgggaccagatgctggtgttcgacaacctggagctctatggtgaagctcatgagctgagggacgatccgcccatcattgtcattgaaatctatgaccaggattccatggtatgggtgggctctggtgccagggaccccagcagcaccacacctggcccttgttccctgcactccacctgcgctgaggctgtgccctcacctccgccacccacctgcagagctccttggccaggtgctggctgggaagctgggagtgggggctgacatctagctcctcctgcctgcttgcggcagcctgaccccttcccaggccagcacatcctcacctcctgtctcctacagactgagccctggaggtgtgccagcaagtcctgctgtcactagcctccccaccccagggctccccgacccctgccctcacctaccacaaccagtaacagccttgccatcctccgtggaggttctggagcagggagtaagggattggggtgacccccgagagttagcgagccaccttctcacataccacctcagctgctgaggtgcccagatagccctggactagaggtaggaggacctcatgtctagtcctgagccgggcatctgccatttactgactgcttggccttgaacaagtctttggtgggccctgagacttggtttcctcatctgtaaaatggggtgatcacacctgtcccttacaacaactcatggcgctgtggtaaggaccaaacgagatcacaggtgtggacagcaagcaccaagaggcttctgggttgtctgttgcgtcagggcaaagctgacttcatgggccggaccttcgccaaacccctggtgaagatggcagacgaggcgtactgcccaccccgcttcccacctcagctcgagtactaccagatctaccgtggcaacgccacagctggagacctgctggcggccttcgagctgctgcaggtgggactgcagggaagaggggctgaggcctggggactggaggctgggagttggggcctagggctgggggctggaccctgaaggctggggcctggggtctggggcctgggggtggggcctgggggctggaggctggggcctggggctgggggctggggctgagggctggggcctggggcctggggggttagggcctgggcgttaggtcctgggggttggggcctggagctggggcctgggggctggggcctaggggcctctctcctacccatcctgaccaaagctgggggcgtggtccttagggggtttccctgtctccccagatcatggcaaacaactcatggggaaagagaccctgtccctgggctccccagtgtgtgacctgtgacccccattccccagattggaccagcagggaaggctgacctgccccccatcaatggcccggtggacgtggaccgaggtcccatcatgcccgtgcccatgggcatccggcccgtgctcagcaagtaccgagtggaggtgcgagggctctgtgtggcccttcccttttggatgaggagtctgaggacccaggaggggaagtggcttgtcatccccctcccaccaccatcaccaggagccagcagcagacccaggctcctgccccagcccagggcctgcccccatctgcaccaagtcgcactcccatgtcccaggaccatgcccagccctcctgtctgcacccctgaccctgcaccccttctccgggcagccccaccctcatccctggagaacgcctgcccctcctctgctctcctggccctgctcccaccctttgaaatctggggtgaactactgcccatcccactgcccggttccctattggatggtccagcacccccatggctggctcccttgactaaggggctctcttctctgcacccaccctccaacctctcccaggtgctgttctggggcctacgggacctaaagcgggtgaacctggcccaggtggaccggccacgggtggacatcgagtgtgcagggaagggggtgcagtcgtccctgatccacaattataagaagaaccccaacttcaacaccctcgtcaagtggtttgaagtggtgagtgcaggccctggcggaggacatcctgtggccagtgtggctccactcagccagccggcttcctctgccccttcttggaggctcaggctcctgtcgccaacaccccaggacctcccagagaacgagctgctgcacccgcccttgaacatccgtgtggtggactgccgggccttcggtcgctacacactggtgggctcccatgccgtcagctccctgcgacgcttcatctaccggcccccagaccgctcggcccccagctggaacaccacgggtatggccacatccaccctgccaccaagcctggctccacgccccccagggaagggctccaggtctccgcccagtccaagccgcgaccagagtttgctctttggggccgagggggtgggcatagaagaaggtcaccctggtggccaaggaaggctgcccaaggtgacgccagctctacagccagagagggcagaactggagacagcctgggggggcctgagggcagaaagccccttgcgctggttgatggagaagacccaggcctccccgccacctccctcccaccggcctccgcagcttccccttatctcgggctctcttcttccctccccatgcccatattttctcccttgactgcctgtccccctctccctcagaaagttccagaatcagctttagttctccgcaccttcctgccccgccaatctcactgttcctcttgctccttcctctgcctgtctgtccatctatccatctgtccagtcaggcttctccggcgctgccgtgtgctgtgcaatgggggctcctcctctcactccacaggggaggttgtggtgactatggagccagaggtacccatcaagaaactggagaccatggtgaagctggacgcggtaaggcgggtggggtcagccccctgctggctgggaacatgcaacttcgtgtgacacatcctgtgaaccagactatctgccccgagagaaaaggacactaagagcctcctttggcatgtgactgtcgggggctgagcttgattgtgtgtccaaacagctccctcctaatactatcctggaatgcacacgcgtgcgtgtggtatgtaaatgtgcatgtgtgtgcgcatgtgtgtggtgtgcatatgtgcatgtgtgtgtgcatgcatgtgatgtatgtgcatttgtgcgtgcatgcgtatgtgtggtgtgcatatgtgcatcgtgcatgtatgcatgtggtgtatgtgcatgtgtgtgtgcatgtatgtggggtatgtgcatatgcacgtgcgtgcgtgtggtgtgcacatgtgcatgcatgtgtggtgtatgttcatatgcacgtgcatgcatgcatgtggtatgagcatgtgcatgtatgtgtgcatgcgtatggtgtgcatatgtgcatgtggtgtgtgcatatgtgtgtgcatgtggtgtgtaaatgcatatgtgcatgtgtgcagtgtgcatgcatgcgggtggtaggtaaatgtgcatgagtgtggtatatatgcatatatgtgtgcatgtgcgcttgtgtgcatatgtgcatgtgtgcatgtggtatgtaaatgtgcatgtgtgcatgtgtgcatgtggtgtatgtgcatatatgtgtgcatgcatgcttgcggtgtgcgtatgtgcacatgcgtgcatacatgtgggtgtgtgcatgtgcactggcatgtggtatgtgtgtatgagagacagagtgagccatcacagtttattataatcacctgctataatttttactccaacaaatgacaccataggtaatgattccttatgagatcatcagtgtcctttccaaagagtccctggttttccatcccagccattcacaaatgacacttccctggcctgggtcagaggaggatttccaggtggaagctccttattcctcctggctttgggcctaggactgttcatctgccagagagagaactgccatctgggggttgggtgtggaagtggcgtacaagctgtagaccctacagggaagggcagaacgtgggccagcctggaacacagcccactgttcctttggccacccaaagaaacatcctcactcagaccctttgcagactcaccagtcagagtgctcttattaatgcaaagttggccttgcgggcacaggggctgccagcacacagtaatttccatctcggctcctccacacaccctgtgctaggccactgcctgccactccaggccccagtggctgattctgcccctgtctccttggttcctctgcagacttctgaagctgttgtcaaggtggatgtggtgagtgtgggggccatgcaggggctctggggtgagagggtcctttattggcaatgatgtcaggccaaagggtccagcatcagggacagagccagccccagcccccgcatgcttgggccagcacacctcccctaagatgcagtggaaaagagctgggtgagtgcaggactcggtgccagtcctgcttgggcgagtggatcgcactggcaggtcacaacactctgtggcctgtggcaccttctccataaaataaggccctgccccttggacatgggtggccccacagagcctcatggagcccaaggcttcctgctgacagatggcggaatgggtggaggctctcgggattgtccaggcaggaggagtccatgtaggactctggacctggccaacctgcaggctgaggaggagaaggagaagaagaagaagaagaagggcactgcggaggagccagaggaggaggagccagacgagagcatgctggactggtggtccaagtactttgcctccattgacaccatgaaggaggtgagacctcgggtagggtgaggggaggtgaccccctccacactcagaccctcctgtccagcttctttcccacggcccccaagagctggatcccaactccattcatgtgagtttgggatggttttgtctcacatccttgaaatcctagctcagaactcaccttccaagatgatggtcccatctaccttccctgcttggttttcttttgtcctcattgactcattccacaaatgcctcttgggtatatgcgatgagccaggctccatactaggtgctatgggagccaaaagatgccacacctgccctgatgggcctccggtttactgggcaaaatggacatgtaaacagagacttagagaggactatgtgataacaaaggcaaatcatggcttgggggaatcagggaaggcgtctcagaggaggtgacctttgtggaaaaggagaaacatgttctcagaggccataagggaacaactgcttatcagtagtccttacgactcttcttcataatgttttattttacacatcttggtcatcggcacgtgaatgattcttcccctattacacatatgtgggttccatctgtttggccagattgcaagttccagaaagcgcatttctctgctttcttgtttgtgtcctctccacgctgcctacctagctcagggtgctctgactggccacctgaccaggagggacacatgcctgcagttgtgtttcctcagtggggccagagctgatccagccacatcctctcccaggccctttctgtgacccaagctaggtgtgatatttattagagcacacattaagctgctgtagcaagttagagtgaagtgaacaagacagcagtttatttctcacataacatctcagagagtgggggttaggctggtatggtggctcagtggtgtcaaggactaagatcctgacctcttgtttgtcacatctgtaaggttggaggtgactcaacatcatgttctaattcaagtgcacaggaagggttaaagaggagatgaggcatatgcttttctttttcagggcccaatccagaagctgcacatatgacttccactcacattgatcagaatctagtcccttagctacacttatctgcaaaggaggctgggaaatgtaatctttcacaaggtggctgtgtgctcagcaaaacttgtaaaaataggagaacagatcattgaggacaactggtagtctcgtctcccaccatcaagttggccaggctggagctgcaagaggctgcctgttgtcgtctctactcctgcaattttcacagactgccaccaggtggcggtggcgacttagttgaaacctggtttctagtttctagtaagatttattctcgtttccagtaagatggggtgtgctgagtgaaagaaaatatagtacattttcttactgttatacttttgtacattaaaacaatttattaatatcactaaaagcaacattaaaatgcactgtacttttttaagtagaaaatgtaaatatttattgcaaggtgttatttcttttttttttaaattatactttaagttctagggtacatgtgcacaatgtgcaggtttgttacatatgtatgcatgtgccatgttggtgtgctacacccattaactcgtcatttacagtgggtattgctcctaatgctatccctcccctctcccccagcaccaccacaggccccggtgtgtgatgttcccctccctgtgtccaagtgttctcattgttcagttccctcccatgagtgagaacatgcagtgtttggttttctgtccttgtgacagtttcttcagaatgatggtttctggcttcatccatgtccctgcaaaggacatgaactcatccttttttatggctgcatagtattccatggtgtatatgtgccacagatgcataaacccctaagtaccactagtcacactgtacacattataaactttttttaacccacttaagcagagcacatggtggacttgaaatgcagtagggaagattttctacttctagtgcattaagactggtctgggcccacaatttggggtcaacagactcctccccaggaaacccaccttctgtccttttcatctcatcttttggcagcaacttcgacaacaagagccctctggaattgacttggaggagaaggaggaagtggacaataccgagggtgagccctggaacctggaactctgcctcctcctccccgcccctgggtggtcagctctcctgcccacctcatcacctgcttctcttttccctcctgccagccctcccagccttagtagccagggaagcagcatcagtaatccatgggcagtactgggcaggctaaggcccttgtccagggaggcttttactctgaccagttcagcacccacagtgatgggcagacatttagagccacagaacatcagagctagaagggacctcagagctcattccatccagcattttccagactcttttccatgaagaaaattgatggatgttctagaaggaacaaattagttttggtcaaattagtttaggaaaagctgattgaaacagcttgttttggtgcaggacttttcataccctttactgtgcaaatgttattatacatctctaaaaggaagacacagtataaaatatttccccagcttattggatcacagtaccctttcttctaaagcatgccagcagcatctgcaccaggtgctccactgaatgaggtttgggaaatgctaatacagagtgttattattatggacaagaagagggaagctagtgaggaaagtgagtgggcaaggaactgcgcagcaacaggcctccacccccaaacccatgctccttcctgcccctctcttccaaagggcatgaagacagtcttcagacaccttcccgggcataaacccactggggcccccagcacctccatgaggcgggcatgctagggagtattatctgcatttgacagcacatggacatccgagagttaagttagtaaagcaaattagcgacagagctgggtctcgaatccaggccttcctgctctgctcatttctgctccacctccttttctgcttctggccaggcctgaaggggtcaatgaagggcaaggagaaggcaagggctgccaaagaggagaagaagaagaaaactcagagctctggctctggccaggggtccgaggcccccgagaagaagaaacccaagattgatgagcttaaggtgagagcctaggagcagacccttctagggtgtgtgggggcgggaagaggggggcgcagtgatcctgcaggtggggcaggacaaaagccagagaccaggcagccgccccctaacagcctggtctgtctcaggtataccccaaagagctggagtccgagtttgataactttgaggactggctgcacactttcaacttgcttcggggcaagaccggggatgatgaggatggctccaccgaggaggagcgcattgtgggacgcttcaaggtcaggccaggagcacgggcccagcctgagcacccgccagcccttgccccccccacaggttcccccactcacctcccaccactgccccggccactgcctccagaagccctggactctcccatgactcagcagttaaagggtgaaggccctgccacatcagggtccagccctcctggtgctgttagctattttgaatgccacccttgccaggcaaacctacaccctgacccacatttgtcttgcccagggctccctctgcgtgtacaaagtgccactcccagaggacgtgtcccgggaagccggctacgactccacctacggcatgttccagggcatcccgagcaatgaccccatcaatgtgctggtccgagtctatgtggtccgggtgagactcccgtcgctttccctccttgcaagtctcctcatcctcccatctgggagagagcaaagaagctgcatactggccaggtgcaatggtttacgcctgtaatcccagcactttgggaggccaaggcaggaggatcacctgaggtcaggagttcgagaccagcctggccaacatggttaaaccccgtctctactaaaaatacaaaaattagccaggcacagtgccacgcacctgtaatcccagctactgaggaggctgaggcaggaaaatcgcttgaacctgggaggtggagcttgcagtgagctgagatcacgtcattgcactccagcctgggagacagagcgagactctgtctcaaaggaaaaaaaaaagaagaagaagctgcatactgacagccccagactgggaggcaccagggagatcatttggtctagtctttatcttttctagaggaagaagtcaacgcccagagaggggtagccacttgcctagggtcacacagcaagcctcctgaggggtccagtgctcctgcccctgcccttcactgtcataggaccctcaggcagcctggcaggggcactgaagatgagcagggcatgggagcctgctcaggcagcccttctccccattccaggccacggacctgcaccctgctgacatcaacggcaaagctgacccctacatcgccatccggctaggcaagactgacatccgcgacaaggagaactacatctccaagcagctcaaccctgtctttgggaagtaaggcttcttggtgccctcccctgccacacccctacttctccaacccagaacacctcccaccctagccaatccttaagcccttctcctaactccaccccaccaggtcctttgacatcgaggcctccttccccatggaatccatgctgacggtggctgtgtatgactgggacctggtgggcactgatgacctcattggggaaaccaagatcgacctggagaaccgcttctacagcaagcaccgcgccacctgcggcatcgcccagacctactccacgtatgtggggcatggggcagagggcgggggcagtgtgcctgctttgcctccactctaaaatgagattcagatcctggtgatttgagaggttagacattgtggtttctgtcccaggccaggcctctgcccctacagtccctgggcacagtcttcaggggacaggactgcagatcccaaaacaaggagagggacagtggattccaggacagaggaggcaggacgaggagagacaagtgggctagggaaggtgggggctagcaagaggaggacagaaagagtcccctggggatctgggccagctctgccacttataggctgtgtgaccctggccaagtcccttcacctctctggttttcagtttcctcatgggagtctctgaggttccagaggagtgggcacagtgaggggatgcagtggggctaggctggggacactgatatgtggtccaaggcccagggcaggaaggttcagcctccagcagccctagtgtctcaggtgagcctggggcccagggcaggaggaatcaggctcacttgctgatgagggcaacagccaactttagagaactggccacgaccagctgtcatccaggatggcttagtcccacccagcccctccaagcctgtgtgtcccctcccacagacatggctacaatatctggcgggaccccatgaagcccagccagatcctgacccgcctctgcaaagacggcaaagtggacggcccccactttgggccccctgggagagtgaaggtggccaaccgcgtcttcactgggccctctgagattgaggacgagaacggtaatggggcactggatgcagccgcctgccccctctccagggggtttcagaggccaggaggggcccacacttccctggggaacctcacagcctagcctggggtgtcctcagcctaaacctggtcttagtgaccctctgctcatcaccccagagccccgttcctgtctgcccagcctctgtgcttccacccctcctacagggcagccccacctgctttctctctgtccaaatcccagtgaggtagagaggctatctgcatcccattctgcagataaacaaaccaagatcctacttctagtgactcgcccaaggtcatgtggctctttagaggcagagcgagggcatcggcccaggtccatctggctctaatccttaaactctccttacttctctgtccatgaggcacttcccagagaagcagagaattgggaggtgtctgtgctggtatctgatcactttcaggtgctgggacaggaagtggattctcccctccctgacccttctctcagcccagcagggctctccagtcaacttccccaagcagaggaccaagggcacagacctctcttggccctgtggggcagctgagaccctgggcaagccacttctccttctgtgcctcagtttccccaacagtgaaaaggaggtggggtagacaggtgatggcatagaggcttctttgtgctcctaagtccctagtcccagcaaaggtcttctggttctgctgagccatgtgtgcagctgagccgccggcacccacaggtcagaggaagcccacagacgagcatgtggcgctgttggccctgaggcactgggaggacatcccccgcgcaggctgccgcctggtgccagagcatgtggagacgaggccgctgctcaaccccgacaagccgggcatcgagcaggtgacacttgcatggccaagactggggttcttgggtattggggaccagggatccccaacctgagtcagtaaaggtagaagccaggcctcacgctgtccgctgcattccagaaagcctggcaggcaccttcccaccaaggcccctcagggtaacttgaatggcaagggtctttgctttgagtgagaattacatcagctcaggcagagacctgggttgtctccctcagaagctgtgattggctattggtgacatcataggaattcctggcatccaaagatggaaactgatgaactgggtccttgacagaacaaaggttaggagggagaggagagctgatcttcctgggcagagggagaaggccctgggagatctgccacaaccctcttcctcagggccgcctggagctgtgggtggacatgttccccatggacatgccagcccctgggacgcctctggacatctcacctcggaagcccaagaagtgagcggcctggggcccagcgctactcccttccggcccaccccacccacttcccaccacggcccaacccttcctgcggggggctcaggtccagatggccttggccagttggcatccctggggcctgggtgtggccactgggccttataggggagaaactgaccaaccaatcgatagagtttagggcctgccctggagagtccccacgtgctaaggcaggacaacgccttccaccctgcatcagtgagcgagacaagccccacacagcacactccggtgcattgtatctacacggtctacgcgcccatacacatgcatctcatgcacacacacacacacagcatagcactcccacggacacccacacacatgcccacactgacgcactccttcacaacacacagaacccctgggagccggccctgcgtcatcctcacatccaggctagtgtgatgttccgccaagttttctttggagtgcctgccagtgatgaatccaggagtgagtgcctggaagaggcaggaggtggtagagtgaaaagaacccgggtttcccatccataaagcggcaggttcaagtccagctgtcagacagtgactggattcagggccagcttcagggatggaggaagccacacagggtcccactcttgtttccatgctcctatgttgccatcttgaaattctttatgacaagtgaccctgcatttccatttggcgctggccccagcaaatcatgcagcaaattctgccaggaatgtcctggaaacctgaggccatgagtcagctgttccagggcctgtcattagggggcacccaactcactgggccactctgggctcgcagccctgtctgcaatcccaggagagccatgctcagatcaatttttagtgaatgactcagcctcactcttaatgattgaaatgaactacatcattcataattacaattaaaccttgaggggaaaatcctctttggggacagggacatacagcttccatgggcttccattgctggctactgggcttaaatgcagacttctcttggaactagcatctgagacagagggtggcttcctcccctcaccccacccccaccgcccacagccatgtgcctggtgggccttctcactcatgcctctgctcccccaaccccaaaccactcctccagccccagcctggcccaggccctgtgctgaccccaagaccccagggcttctctccgcctgccccatcccagccctggcaccctggcataacccccacctggggctgctaaccagccttctctccctgggcccaggtacgagctgcgggtcatcatctggaacacagatgaggtggtcttggaggacgacgacttcttcacaggggagaagtccagtgacatcttcgtgagggggtgggtgagcagtccctgcatgggagggactgagctgggtggggcttgcttcccggggggcaggagaggaggcagagggaaggtggctgtgggtgggagaggccccaccagcctggctgcgggtctggagatgtggcgcccacaggtggctgaagggccagcaggaggacaagcaggacacagacgtccactaccactccctcactggcgagggcaacttcaactggcgctacctgttccccttcgactacctggcggcggaggagaagatcgtcatctccaagaaggagtccatgttctcctgggacgagaccgagtacaagatccccgcgcggctcaccctgcagatctgggatgcggaccacttctccgctgacgacttcctgggtgcagagcagggcagggatgggggttcaggatccagaactgagaagaggcaggggccgggttggcggggacagggagagccctgccttggggggacaaggggtcattgcttccagtccatcagagccaggggtgtccgacggggttccgcccccaaggacccacctaaccgtccctaggcagatgttctcagtgtcataaccaggctgacaacaagctttggacacaccaaggagggggcagtcagtgatgatgggggaggggagaggctccctaagggagtcgggaaacctccctgggcctcaggttgcttctctgtaaagcagggattctccctaaaactctaatctgcatctgcaaaagcttgtgggattagcaggactttgacagaatggatgcatggcagggagtggcaggggagaccccaggagagaccctctggggtgaaagaaggacctgagtaaagcatgggggctggggctgcctagcaagcccacgaggatgcctgcattgaggccagttgctgggagtgaggcaggaggatgagatgtgggctcagggaggtctgcactcagcaaacaaggggccgaggagcccagacccccacccccaccccgccccaccccagccctgttcactctgagctgacactgaggttgccacaggggccatcgagctggacctgaaccggttcccgcggggcgcaaagacagccaagcagtgcaccatggagatggccaccggggaggtggacgtgcccctcgtgtccatcttcaagcaaaagcgcgtcaaaggctggtggcccctcctggcccgcaatgagaacgatgagtttgagctcacggtgcgcaccccttcctgctcgggcagtaggcagggctgggactggctggggtgccaagggcccagcacgcagcctggacgctgggacctgtctgtcctctgcagggcaaggtggaggctgagctgcatttactgacagcagaggaggcagagaagaacccagtgggcctggcccgcaatgaacctgaccccctagagaaacccaagtgagtgccctgccggcccagcccctccccactctggctcttggaggcgctggaacaggaaggagacgatccccagacaccccatctcttcctgggccacagcctcattacaggggagcctcctccctgccctctgccaaccctgaatcccacaacgtccctttgaaccagaggatgggctaggaatactggagagcaggaccttccctgggaaaggccccatctagcggagagaaactatgctcttcccttcctagcttttgcagaagagccagctccagtggtggcctctggggccatggccagccttgatggccagaggggtgcctagaactgcacacacagcccaggacagcttccctcttggtcttggcccctcgccacacccaatcccttctcctccctgtccctcctctgcgctctctacccttcatactccagccggcccgacacgagcttcatctggttcctgaaccctctcaagtcggctcgctacttcttgtggcacacgtatcgctggctgctcctcaaactgttgctgctcctgctgctgctcctcctcctcgccctgttcctctactctgtgcctggctacctggtcaagaaaatcctcggggcctgagcccagtggcctcctgggtctgatatttcttacttcttcctctggaccaagggctaggcaggcgcgtgcacacacacacatatacacgcacacatccacaaacacaaatatgcatacatgtgcacacaaacacacacaagcatgtatgcacacatgtgccacgcacaagtgcatacacatgcactcaagcacacacaggcacacacttaagcccacacaaacatgcacagcaactttcaagctttcatgacagaatagactctcagaactagaaatgactattttacacttttccacattaagccaaagaggtgaagtagcttgctcaaggttacccagcaaattagggtagagccgggactcaagccaaggtttccaaatttccaatcctgtgttctttgcacaccacctctgctcccagccatgtttctcccagactgtaacccaattttttttttttttttttttttttggagacagagtctcgctctgtcgcccaggctagagtgcagtggcacaatcttggctcactgccagctccgcctcccgggttcacgccattctcctgcctcagcctcctgagtagctgggactacaggcacccgccaccacgcctggataattttttgtatttttagtagagacggggtttcactgtgttagccaggatggtctcgatctcctgacctcgtgatccgcccatctcggcctcccaaagtgctgggattacaggcgtgagccaccgcgcccagccgactctaacccaatttcattggcagaaagaagctgagctatggacagggaaaagggaagggtgtggccagggttagccaacaggtctggaaatggctctcacccgtgtgtgacctcccagtccagggctgttgttttctgcccttcaggataataattccattcaactcaaacatttcatagccaccatggcctgaacacccaactgcaggtgctcagagctccccaggcactggctcactgtgccattgcgccaaacccaggaggtaggtactgcttgtaaccccattttatacatgaagaaaccgaggttgatagaggtgcctcacttgcctgtgaaaaccattcaaaaccaggtgccctgcacccaagccccggctctgtgtccccaccaatactgagctcagctctggggctgcacgccatgtcctctgggaggcagtagtttgaaaatgcatatgcagtactttcacttgtatcttgacattttacaaaacctattgtttttataacacaaacgacagatagtgaggctggccaggtgcttctcggctgggaggctctacagaaggtggagtgggtcttcatcctgagagtgggcaggtcggtgagggcagcttgcaccccacaggggctgctcagaccctcagcagggcccggtgggaacagccatttatgtccatcagaaaggaagaggttgtgaagcaccagtcttaccaaggacgtggggcagcacatagaacgagctaaccgcaggagcttcctaacgatgagaactgcctgcagggccaaggctgccccatgctgcaagtagctcccatctaggccttaggaggagattcgggccccaaaggtgctgcagggaggatagagttttgtaagcagcaagtcgggtacttagaaatgggtttaaaccctggctccagcattcactgcttttggggctggggccatggcagggcttttgggggtccagaaggacagaggatggggtgcactgggaggcagctcctgcccactggctgaccggctcctctcttccacttcccagccggcccgacacggccttcgtctggttcctcaaccctctcaagtccatcaagtacctcatctgcacccggtacaagtggctcatcatcaagatcgtgctggcgctgttggggctgctcatgttggggctcttcctctacagcctccctggctacatggtcaaaaagctccttggggcatgaaggccgccagctcccgccagccgctccccagccctgccgcatttcctttcagtggcttggactctttcccatctcccctggggagcctgaggagcccagcgtccactcttcatgccttgggccgagcctgcctcctgcttgcgggggccgcctgtcctcactgccccaggctgcggcttgcccagtcccgcccctctgacccctgcctgtgggctggggagccttggatggggtggggacctggaatgggtctctcttgccccacctggctgaggcgccacccttcttcaggcccaggctccagaggaagactcctgaaaccctccccaggtcttccaagtacaggattgaagctttagtgaaattaaccaaggaccatgggtcagtgcccagggctttaaaaagaatgaacgagcaaaaggtatccccgccgtgacccctgcagatagcaccggtctttgatccgcagcaggggccagaccctgcccacaagtcccagcgcggctgcttctgccactgctgggctccacttggctcctctcacttcccagggggtcgcctgtcctgcctgtgggtttccatggcttcccagagctccctctgccccagccagcgcctccaggcccagctgaggagctgtgagaagcagcagaggggactccccatcccgggcacaccctgtcctcccacccctgcccccttgcccttccagccctttcagctgcagctgggagctggcccgtcaagtgctgcccctgcctgtgtctgggtttctgttggctgtttttcttttcttgagtggtgatttttctctaaataaaagaagtcaagcactgagctgacaggtctgcactggtcaagctgagaggagcagccgcaggtgcggggcagaggcagcagttctctaggctggcagattcagtaccagcagggctcccatggcctttccccttcaagtggcctctggtggcccagggttcaaggcaggcctcaggcacagggctgcccacccaggctgcccacaggaggagtcttacaccatagcccaaagggcacaccagcctgggcccaggggcccccaaagcaccgaaagaatccttcaggtctggggccagtctgaaggcttaaggccccacaagggcccaaaagctctagcctccacccacagaaaccagttcccctgaaagcaagaaaggagccccacgctactggcctcggcctctgactcacaccactatctgagcctggggcaaagtcccctcatgacacagaggtaggggcaagggcctggtcttgctagacctgacctctttaaagagattcagccacaactttaaaaggctttaatcataatgcaggacacaggtaactcctctggctccttatttcgacaggctataaagacagccctggaaaatccagagagcaggcccaggtgcggcccagtgggtgatatgagctggctccggcacagacaccagcatcaggccagccctaacacatcagcctttggcggtccagctcattttgtgggtacccgcaacacctgagtgggaggaacttgcagttcagagttgatctggaaaagaaagggtgaaagtcgttacatttttcccagggccctccttctttgccacccttgcgagccacgctggctctcccatgggcctccaaagccctgcacgcatctcctctccaaagctgagagatgctgaacacccacagactgcctccctgcaggagacacgcctgagccttcttgctcagcttctgctccagctgtgacctctggtagcgttcttcatctcccgcccgtccattctctgcagtcttcccctctcctctctccacgcacccatgccatccccaatctagcctgccccacctcttcctcccccagcctcttgtatacagtagcatctgtggaagcgggaaccataccgtccagaatgtctgggtcctgtcacaggccaagggtcattatgaggccaaggttcactacaacatcccactttcagctgtggcctgggacctgggactgtgctggggccacgcagcccctgtggctggacttggagctggcctcagtcacctcacacgtgtgcaactaacagctgcgtcacgaccttcctggcctacagccccagctgcaggtgcccacacccgcagagcaggaaatgtcagcaatggactttttccttcctcctcttgccaggccatggggaagttgtccacaactattgcagggttgggcacagatgggggccagggaatatctgccccagcagagcctccttccccatgcgaggatgaccctccagtcatatcccaggcagggaaccggggctggtgggtggaaagagcccaggctctggacgagttgcaaactctgcaagttgtgattgtcctttgtgtgaaatgaggagcattgtttccgccctgtccacctcacacagcgggtgtgaggatggaagaagagagcacagctggaggctctgtagctggggagctgctcctggctgtggcactgcttcacacagagcagtcccagctggccactggcaccagaaaccacagtatcaaagagacactgtcacacctgagctgtcctggaggagacttcaggcaagatctactcctttggccagtagttgtctcaaggtgccactcttgattttttacatcatatcacaaagctcccttgcctctgacggggaggggactcctcgttccctaatcccagctccagtgcccctgccccacccgtgtctcccgctgcccctccttggaaggccccgccgcccaccttggagttcagatactgctgcagtagcgcc

SEQ ID NO: 20 - protein, 110 aa, Homo sapiens
MKTDSSFIMDSDPRRCMRHHYVDSISHPLYKCSSKMVLLARCEGHCSQASRSEPLVSFSTVLKQPFRSSCHCCRPQTSKLKALRLRCSGGMRLTATYRYILSCHCEECNS

SEQ ID NO: 21 - DNA, 330 bp, Homo sapiens
  source 1..330: mol_type = other DNA
atgaaaacggacagctcattcataatggactcggaccctcgacgctgcatgaggcaccactatgtggattctatcagtcacccattgtacaagtgtagctcaaagatggtgctcctggccaggtgcgaggggcactgcagccaggcgtcacgctccgagcctttggtgtcgttcagcactgtcctcaagcaacccttccgttcctcctgtcactgctgccggccccagacttccaagctgaaggcactgcggctgcgatgctcagggggcatgcgactcactgccacctaccggtacatcctctcctgtcactgcgaggaatgcaattcc

SEQ ID NO: 22 - DNA, 24900 bp, Homo sapiens
  source 1..24900: mol_type = other DNA
aagatgctccgtggaagggagccgagcggtgggcagaggctgagtccccgataacgagcgcctcacatttccgtggcattcccatttgctagtgcgctgctgcggccgcacgcctgattgatatatgactgcaatggcacttttccatttgacattctctctctctctctccctctctctctctccctctctctctccctctctctctctccctgtgtcgcttaaacaacagtcctaacttttgtgtgttgcaaatataaaaggcaagccatgtgacagagggacagaagaacaaaagcatttggaagtaacaggacctctttctagctctcagaaaagtctgagaagaaaggagccctgcgttcccctaaggtaagcaggaaaacaagcgctgccggcttgcctaggaaatcgcttctttccaaaccgagcatttcatcctcctctcagacaaagagacaacctttaaataccacttaaatttgcattactttaatttgcattaatctgtagcatgctagcattgtgtttcttaaatgaacgggtctttgaagtctgtgacagagcagggagcctcctagaaaagcttgaaaatatcttttggtttgacttaaagagatttttcttttcaaactctctgcgtagttagatgtaactttgtgatggttcttatagttgaccccgtgaaagggggctgcgaagcagcaacttgccaacatggattcatggagcccagtatcttccccagcaccctcatcccacttacaatgggggcactattaacgcaggcaagactgcgagtttaaaagcgcactgtttacttttattactacttatgtatgctgctgatctcctgccagggctctgccggagtgctcagaatgacttcaaacaataggcaacatttatttctagctttctgtgtcacgctttgcaggaatcctgctcccttgcactcttctttcagcgtgcaggtcttcgcttccatagatgcattggggagcaccgggaggagatgaggatggatttactgtatgattttgattgggcaaaaagtccgaggaaatgcatgctgtttgccttggacttattgcagggggttatttttagtcatcagctcgtccctgcagcatgatgttcaaggagtgaccgggaaaggatgctcccaccagcacagagaccaggacctgtaggaatgactcctacctgcgggatattccgaggtttctttcaaactttggaatacaagttctctctttaaatgaacaattgagctgtaggaggcctgggcataactctttcttgggggacgggaagtttgattgtgtacagaatgttaatgactcagaacgcccagtaactgaggctcattgtaatagacaaacccagataagcctccatgagaggcagactcccatctttactgagattcaggtgcgggaaaggaagctatttggcaagatgggagtcccttgtacagttctttgtaactcattaataacagatatggctgctgtgaaacatgtctcttttcatttctaatattagtgtattttaattacaaggagctggcattggcaaattaccccaacacataagattaaataccaggtgcatttgaaaacagagagatgactgaaatggggagttgctgtgggtgtcaaccaaatacagcggggacggcacaatgcttctcaactgagcgtttaaaccagatgcaaatatctgctcattttcttctcatcagtcttactaattcaaggaaactttatggtcctgtttgccagttttcattgcaaattggtacacagtttatgcaaaacttttctgattttctctgataaccagcccaataagcatcgctgaatgaaaatctgatatttgaataggttaatttacaactttggggtattcattagtcaagaaagccataaaagacactatggattccattgctgtaaaattttattgtaatttttttttaaaaaaactgcggttagcaaagcatttagctgaatcaaaacaattttcttagactattattcagatcattacatgagagtatttgaacacaaaatgcaatgttttgcatcatttattttaaaatacatttggttcaggtaacgggagaactggctgaggccttcttacgactgtgtaccaagcagctgacacccacagatggaaatgtgcctgtggagttttcaatcttaattcgagttccaatgacactgtcaagggaaaaataaatcatttttcaatacatttaacaatttccaactcatttattttcctgggcccttgaaaaatgtggtgagtttcttggaattatagccaccaatggtggccagcaatctttattttaagaactcacaattcaagtactattattctctggttaattatttatttcatcaatttttaaataaatatttattaagcattttctagatgcccagtgctatgctagtcccgatggatgcaaaggtgaatgagacattgtcccatactctaattctcagtccatatgccatctctagttagattttggaactgaaatgggcattgccaatgggtaaagtgggcaataactttcctgttataaagaattatttaaaacagctactggtttctagatttacttgaaatgattctcactcatcagtgggttttctttccatttatgattaagggattcccctttggcctttttcaccagatcctgggtacacgtcatttgcacagctaacacggctagatctttccagcctgggtagaagaatcccggaaaaagacagtagtttatcctttctctgctctcctgagcaccctgtggaaaggaccatatgctgtctctattggggatgggtgtgagtcgcctactcagtagctaacatcagggccacttgatgaatcatcgaattagaaacatgcatatggaggaagatgcagtcactatccctcaccacttacttgtcccacccccagtatcaaaacaaatgacctctgggcctggcctaaattcaagaggcccctgggaagaagctgttggaaactcttccccaaacccaggtctccatcatagccacacagtgttgctttcaaataacccagtatggtgttttatcacgtgtttaggttactgggggaaaaaaaaaaccctgaaaacagcatcaccagggtccttgacttggtccttatcagcagataatcccccgtggttggattaaaatgcctctgactccctggggtgcctgactcaccctagccagccctcagcttcttggccagcggccttcgagcccatcctcacctcttcccatgacggccagtgactgcttctttgcccaggccctctgcactaggccagcagccagtgggagcagaggggatgggaaggcaggtggacagactgtgaagtgctaaggcagagcggggaagcagggctgtgagacagggtgggtgagctccagggcctgggttgctgtggcctgccctggctgtgatcagctgtcatttcctctttgtgtatgacactgtggaacatattaaaatttctctgggatggtatgtttggaattcctctgatgccccacctcaccaacttacccggacaataaaagcaaggttgtaagcctttgaacagctggctggctatatatttcccttctttctttcgcataatctaattcagaaaagaatccagctagactggcagtgccatgtctgggtacttgtttcctgcaagtccttcctcctccacctcctcccgccagtcctggaatcttcctgggtggcatgtggcttttcttttcttttgctcaccactgctcccagcccgcccccttttcccttcgcctgagctccttcctttgtcagctggctctttgctctgcctgttttccagacagcttgggtcctgttccatccggggagaacagcccatgggatctccccatctccatagtattcccaggatgtcattcttggcaccagctctgccgggctgataggactggggggctttttgtagtcccgagcctgaatccactcacagagaggagcagccacatggcttagctgccctttgggctgccgagagcggggctggagtgaccgggttggcaggaacgagcataccatcacagtgacccgaacatctccggcaaaggccttggggtgggagcgctatgggaatgcctggatgcacttcggcctacattaagagaaatgtggttattctctgtttcgggggagagacaagcggcttgaaacaaagccctctggatccttggccccttccctgccccctttcccggtctgtccttcccacatccctccctccccaaacagaaagaaagagagacaggacttctaatttggccagcacagacccgaatgtctttatgaaacccatttagtgaaagaaagaggggagaaatatattctgggttgatccgaactaaaaaatgcatggggctttggagatggggcgggattttttctttctttctttctgtctcttaagagcagaacaacagtttcgttgatgagttgcaaatggaaggaagtggacctctcaattagagattcccatttaagagcctcaatgtaaacctccctgtgacatccttaaaagatgctgctaatgtccctgggaccaaaaggtattaaacagcaagccaccaggcggcttcctattccttttctttttctgggggctttggtcgtctttttcaaattagctaaaattcattaaaggacccaaaaggaaaaatttaaagcagctgaattaaaatgagtctttccctgttagcctgacaagaagaaaaaaagaaaggaagaaagggaaagaaagagaagaaagaaccaattcccctccactaccacttcttgggttttaatatgaattattccatacaagtccctaggctagaggatctatttaaagacgcctggcagcatgaagggagagggtaaaaatacaaccactcttttgtccatcaaaggttttctttgggaggacattaagagcattcctgttttcttgtctgcccctgccagtggcaatgttccagctggtagtatccactcctcgcccatcaggtcagcaatcatgaacttctgtgtttaatttcaggagaaaacaaagggtgggaaatccttccgaaacccctatgtgtgtgcagcagggcaggggaggctggaactggaatcagtactctcttggctgtgcaggttgcatgctgcaaattcacacacccacacagttgagttgttgaggaagattgtgccgatggcattatttctgatgccagcttcccttgcatctgcaaagcttttttcttgtgtctctggcagtcatttgcttgtcaccattcatgtgcactgtccccttcatcagaggttctcagagcctgatggtcaaggatatgtcactagagtcttacccccagacccattttcaacagtaagaacgtgaaaccctggatggggtttgcaatctgaagcaactactttcttgttaggaagagtgctgactcagaaaattcaaagaatgggtaacttccgttggcgacatatccccagtgctcataatcaggaattcatccagttggggtccatttcaccctcatggcaaaatctggacataaacattgactagtagctttaaactgggtataagatttgcaacagataacatttttgtcttttcttttttcttttttttttccacaaaagctaagaatttttcagacaatttgctctcttccaaggcctggatcaatcccaactttttcttttaagccatgatccaaccaattgcagtatcctttaaaaatgaaagggcaacaggctaagacattcaagaaagttgataagctgtcagaaaatgctcaagggtggcctttctacagtgccacaaaccaacaacagccctaaacgtggagtcctcttccatcctttcatcagtagggaataaaaatagggagagagcaggtcaggggagaagtaacaaaagagaagtaagaaggattatttttgatgttcaaaatctgctgctgccctttcaatattttcaaatatcacaatttcagaaagggaaggatccctttatttcacccactctccctcccaggaaggtgtttgaagttgctgtctttacctgaaaaggaggtcaactcctcaagtgaaaaaacatcccctatcttcaactcgaagtaaaatggaggtacacacatttgtacctaattatgtgggtacaaatataatttgtatccacaaactataaaggatgtaaagaatcaaagaaatccaatccttaatcaaagtccaatttttctttaaaacttgagaggatattttagggctcattgcattgctgtgatttcactgccccccaccaaattatgaaaaattactccttttcagaatttaaatttttcttttgagatgtggaatccaaaggcagcagaatagtattgttacagggaagctggcagtcaaaagacatagacatagctgcagcatgcatggtttaagcaaatcaagacaagcagaaaaccaccaccccaacaagttcagggttatcagcaatatagggacacgtatttttatgtgatttttatgagaaccttgcccctttgacatatgtctgagtctaggagcattccggattgcaacgggattgaattcagtattcaaatcccaccattgggcagaaaaggcaaattgaatggggaatggaaagactgagttgctcctattgtttatgccccattcctaactaagggctctacagctgttaggtgagatcactacccaccattccaaagtgttgttgcgggtgaggaggttcaaacgcagctttggaaacactttgctgcactctttgaagaaaggccaacatgctcatttggctctagggtaaaagagagcctgtaccctgagctaacattggtcacctctcctcctgaggccataccacagccagcagtacagcagcagaacaagtgtttagttgtttcagcacaggtatccccagaacacctggcaccttttcttttccacagggagaatgtacattcatgcattttggcaagactgagtcctctgagttgggtgtctcggaactctcctattttccttctaaagggtcttatgtaaggtgagcagtagagtgtgtctcattcctcataaaaaatccccttcctgggagggagtgggtgaaatgaagggatccttccctgactgaaattgtgctatttgaaaaaattgaaagggcagtggcagattttgaacttcaaaatgaatccttcctcctcctcctcctcttttgttacttctcccatgacctgctctctccctactttaattccccattgaagaaaggatagaagaggactctgtgtttagggctactgttgatttgtggcactatagaaaggccacccctaagcattttctgacagctcatccccatctcagtcacagcttttatttgggtagctggatttacagaaataatcaaatccctagaggaaaagacttcaacagaaaagtacctcctgacacttgggtaacctgacttggtcatttccaatttatgcaagatttgtattctaaaagtcaattagttatgtcaactgttaaaaactcagaatgagtctttccattcttcagaatgactcttttctgattatctgtgggccatagaagcccacagatactcagcacaggatccaagtgccataccaagtggtcaactcttttagacgtaagtctcagcccagggcttctggaatgtacctcccctagcagagaagctctgtagtagatactttaccaagcacagggcctcgctcttgaccccaagactactgattctacttgcagagaagacaacttttctaatcaatctttctcttctatcctgaaccagagtatcagagattgtcccattagggcacgaggatctgtggctcaagctcagttaagaaataagcgtctttcaaaagaaaggtgcaagagggtggaactcagcctatattgtcattatcaaatgcaagaagtctaatcctagcatgatttattaatattagcctttcttctctccccgtttatgctttggtgggtactggacagaaaccccacaaattttaagacagttttaagagaaatagtaactggttaaatatcctcactacttcaaattattattattattattgatattactgttaacttttgtttttttgagacagggtctcactctgatgcccaggctggagtgcagtgatgcgatcacagcccactgtaggctcaaccacccatgctcaggtgatcctcccacctcaacctcccaagtagctgggatgacaagcgtgtaccaccatgcctggctagtatttttttattatttttgtagagatgaagtctccctgtgttacccaggatgatcttgaactcctgggcttaagtgatcctcccaacactgccttctaaagtgctgggtttacaggcatgagccgctgcacttggcccacttcctatgattaacaggatattattaatttagaaactatttagtacatggcaagcactcagtcaaatggttattaacggctgtttttatttcaggccaccaatatagcttcatcaaggggcaaatacttatagcttgggcttcagtgttggatcagacaccaccttagaagttttttgcaatcattaactccttaagtaagaagggaactctttttgtaggattgctttggggaatatgtagccccaaggcaggggctgtactctgagaagcttgggtagagttggagactgttagaaatggatagacacataaaagcatttagaccaatctgttcattttgcagatgaggaaattgagtcctagaaaaggcaagtgacttgttcaagatcacacagccaatgatgggagggtaggactcagggcttgaggatcagtttcagaatgcagtgaaattgttatcccatatttctttcaaatcagtatagggacacggaacactaacaacataggcgaccaatgggtctagggaggaaaagatgaaagctgtaggtaagtgggagtttggataacaatgagatgtttttctggagttcctgacaatgcctgaaaaaaaaagtcaggattttaagcttcagtcaggctcaaggtcgagtcctcccactccagtccctcctcagacagtaaaacttttcaagccaaggacatacatataggtgggggcatttgacagttggctcatctccccaccctccaaattatttatatttctagtccttcagtttagcactcctatttaccccaggattgtaattcattgcctctttccctggccatattcctccatcctttttgtttctcccatctcttttcttcctccatcacccccactgctgagcttggctacacttggctagtagtgcaggttgggagaacacagagtcctatcacagactggaggactattatttaatcacaagaatgttgtcttttttctcctaaggtagcactctggggacggtcattgctgtctttattccctcacccccccaccacccctgcactggattagacacatgaaatgtgcctatctctgagatgaaaggagcaagaactgcttcctccccactgaccttttgcctgcccatccttggagatacctggagttggcaggctggaggcctagcagcatttgcagtcagtgccgctgcctctgggtcagcccaggcttggctccttggctgctactgatgtgctgccagctaggaatattaaaaaccattcattgaacgcacaggatgctttataaaatccaacatgctgtttacagtttataaattaactgccttgggaagaggcatttgacttattctccaaggcatctagttgactagatccaattggaatcctttgagttcctgggaaggggctacttaacacttcacactttctaaattagacctagagtttcttgcttttctgatcctagtactgtatgaagttttatctagggttatctagcaagctttcttccacttataaatctttgatgtttttgcaatttctttgatagaggctttatgttctactatcttcactttatttatgcttcataccataattttttaaaaaattacaataaatatcaagtaattctggctgatatactgactccattccaaggtcattatattttatttgcttaacttggtcttcttagaaatgatgcaatgaatactggatacaaattagatgttcagagagtttatcaatgtgtctaaaaaccatccaggaaaacaacaggccaagactctgcctgcagagtcagtgagctagaagagggatcgaggataggaactatatttttcccctgaccctatctcttatctgctagagcaaaaggagacacacagtaggtgctcaataaatacatgttaaaaaatatttgttgaaagaagccacagaagggaatatcagtatacattagtattgaaaacagcctagggggaaatatggatactgaagcaccaccctcctgtgcctggcaagcaaggcaagaataaggccattcttggcacataccacttagcctgttgctgagataacttgcgtgaaaccagcactttaccctctgccagccagaaggtcagcccaagagtgagctgatctgtgggcacaacaccatctctcacccaggaggctgggcccgctgtaagctctgctatattatttccctgaggatgacaggtggggaaatctgggcaccagttgttcttttccactggtatcatttggaaggtagctccaaagtcgggcacgccagcctacgtgcctctcctgccggcagaggctccacattggagctattagaatgtgggctctgtacgtcggccaagtccatgtctcagagactgtatccagagcatagcgtggccacagggctactgagttcagcaagagagtcattctcttgttcaatccattattgcctgggccaaggttctaagtcttcgtaggcagcatttgattttatgacacgtcttaaaaaattaaggcaaactggaattaatttagttttgagaaaacaacagaagctgctacaaggcagagataattctaggctgccagaaagtggtgatctcagtggtgtacattttcttaattcctgattttcctctttgtgaggtcttcctcccactcccatactttgcacattctcacctatgcacaccctgagcaacacaatgttgacaacttgacttagcattgctcttttcttaagctttgttttcatttcttcttcaatacaacagtgttggttcattcaatttgaacactcaaggcaaaaaaaaaaaaaaaaatcccaggttatgttttcagaatcttacctttttgtttttgttttgagggttctgtgagttttgtggcatatttacattgttgcttacattcttatttcagaatttaagataaaaactgggcaacaactctcacgttttctgagtgtgttgaaatgaaaaatctgtttcttagaattaatggtaaagcaacatttcctgtcaatctttcattctttaatattacttctgggttcagctcaccatctctaaagagaaagccagatgatcaagttacattgtatgtgacattaactatctctttatctgtgtaaatgtcataatatctgcttgcaaagtgttttattcatttttaggaaaaaattttaaactgtgcttgcaattcaggatggtgctactaggtggcagtaatgtacaagaactatgtggtcgccctggaagagtatttgactaagagactagcatgccttcccgtaattataagaaataaaaatataatatttttaaaatactcaaactggcacaaacagtaaacatccattaacttagttaccatatttaagctgagcttttaaaagagaaagccttattttttaatgaaattttaaataaagtatacattcacaagctcaaaaatctaaaaatacgaaaagatatatagtgaaaagtctttctctcatgcctgtccctcaactaccacaggtaactaattttgttagtttcttgggtatcctttcagagctttgctatacaaatatgtgtttttatctctctccattttaactcaaatcaatacatagagtttctgcatccttccatatatagttggttagtatattgttgtgtgaacattttagaatataattaaccagtcccctattaatggatatttcatgctgtttccaattttatgctatttcagccatgtgctcatgtgatttcacatgtaggataattcacagaagtggaattgctgggtctaaattatatacatttgcatttttaaaaggtattgccagattggcctctacagagtttggaccaatttatactgaactttctccaaaatggacttgttttcccacagccttgccaatagggtgcatgatcagacttcggaatctttgtaaatctgattggttgaacaatgtatttcaaagtactttaattttcattctcttaaatgagacttttattctcttaaattctcttctatctttaagggccctttatatttcctttttctgtggagaaagtggaaatgccaataaatacaacgatgcatacacatgtatagggttttgttattgatgtagcttgtttttgccatcatgctgtacatgatgttctttaatttgctttgctcatttaaccatacctcctggccatggctctgaagagaagttgctggcagtgcagaagaagggccaggactggaatgtctgcttctctcttcatccttttgccattgactcctgggggaaatatctgtagaccgaagcagtgaaatctaatcaattctctttctgacactaattaaggcttcaaagagacagataaccacttgggataatttagtcacagtgaaacttgggaaatggtcagtaatatttcatcctctgaaagtggaccccaagaaagttctggctctttgagttgttgtcttggtaattttcagggtaacgtgtataggaaaacccagattatgcagatgaaaagaaaacaaacatgctcttctgcatcctttgcagatttgaaactttgggcacaggtttgatttatttcaatgagatgttgctattagcatgaacataaagtggtgcaaagttgtgctggaatatggtctcgtcaactttgggctcactgtctgcatatggagatgatagtaactgaatccatagttatcaagtggtggcattttagaacacaaagggacagcagatgccatctctgtcaactccttccctctacagatgaggaaacttgggctagaggaggttgaatgacttgtgtaaggcttccccagctaattaatggcagtgccaggactcaagtccaggtgggttccctcattactggtccttgcccttcctgcaatttataggacttccctgaggcacatgtgctgaggctttgctattgccagggattctgtgctctgaaacagccctatctcacacacccctttccacttaggatcccctacctcacacttccaagacagctaattgaggctaaatgggtctgatgccattctattagtgcaaaataaattggcttatgccaacttgaactcctaatcttgattttatcaacactttgccctgtttattcagactgttcatgagtaggaagttaaggaaaatgttgcctatgaacaaaatgatcaaacttttatctgaaatacctttgaaagttttcccgaagctttaattatcatgttccttttgttttggatgtaatagcaggccctcccaattttcctaaatgtttgaaaatatttttgatactttctgtcttctgttgtggttaaaaaaaagaaggcaccagtgttggctatgcctggggagttagtgaggtaatctggagagatctctggaccccagtcctttgtccaagaggtatggtcaaaagaacaaagcaaatttcagaaaaaccggtataatatgatcctattttaatggtaagtctgttccaacaactgctttctttttcgaattacaccatgtgcccaggctacaaaggctctgcagaaatgtgactctgttggcaaatacgcgtgtgataccttaaccatgctggaggccagttagcataatgtgtatttcagatgcagtttgtcatcagtgctgggtgctatggggcttaaaacaaaaacaggatgagcctagagcacagaagtggaaaattaggtgggtgggtgagtatggacttggaaatggaaaatgtgcttccctgtgggacatggcttgtgttcattagtgctgacctgcctcctctctagccctgtaagctgacgctgacaccaaagcttgctgagaaactgaatagaccctcccgccccgaccaaccaaggacaaagatgagaccacccaattcggttacgttgttgccagaacaacatgtttaatctttaacatgggttcaaactattcttggccctaggaacatggacttcagcaattaaagtcaacatgtgcttccattaaaccattgtgtccacctccaaatggttataaatatgtagcataagctatgggagttggggtggaatggatgacagcctttgctaatgacgctctagaaaccaatattctcctctcaaaataacatggaaaaattctacttaatacctcctgggttccattagtggttctgggtaaataattctggggaaagtaatttctgttttcattccagctgtgcagcagatactgtgatgatggattgcaagtgcaaagagtaagacaaaactccagcacataaaggacaatgacaaccagaaagcttcagcccgatcctgccctttccttgaacgggactggatcctaggaggtgaagccatttccaattttttgtcctctgcctccctctgctgttcttctagagaagtttttccttacaacaatgagaaaacatgtactagctgcatccttttctatgctctccctgctggtgataatgggagatacagacagtaaaacggacagctcattcataatggactcggaccctcgacgctgcatgaggcaccactatgtggattctatcagtcacccattgtacaagtgtagctcaaaggtaagaccaaggtctctgtgaggagagcatttccctcagaaacaggcaagaagccatatttctttgtcaggggatggagaactaagatcatagcccaaacttaagtgatgtggctggcccacagggcttgtgggagaatgaggcttttagaatttccccccgtgctttgcactgttatcagtaaaagtgcctaatcaatcatgtgcacacccatccagtgggacaggtgtcctttgtccctggctgtgatgtttatgagtggtagtgtgcttttccaaaaaagaaaaatggagtttacaagtcatcataactctctagctccatcatcaataaagaggaagagaatgcaaagaatgcgattgagcagtggaacatacttcttggagggctctttaaagagattcttggtgaaataactggctttgtggtctgagcctttcttcaggtgctacatttctgttcaaatgatttcaaaagataagatggcaatatgatcatttatcatttttacattgcttatccaaatcgttctcatttggaaaaggatgcatgtttcttgcagaggcagtccgtgcctcagtggtgtgcaagggaatatcatgcttaaaaggccaccaagagtggccagctacatggaccacccagaagggaggcacattgtagggtggaacatacgagatctcacgactgtcactgcccctaaacaggcacaatgaatgaaatttgtccacacttggtaaataataatttgtttagcccaacctcagagatttttacatttagttttgagatgaaaatcacttaaacattctcgtatggcaagtaatttttgaaattaccagtataattaagaattttttatagtatcaatcaccagaattaagaccatataagccaatccctccactctccattcaaaaacattatgacttttgtatgccttgaaaatttccattaatttctctgattatagctcagtgatgatgattcattttagtttaggaggatcagaattcgagttaaatcattttaaccattatattaataagatctatgactgtgggaaaaaatagagattttccacttaataaaaactttctggctcttatttgtgcttgtagaaccaaaaaaaaatggagtaaatagatgaacataaatttttgcagggccacaattccttcttaggaaagggaaactaaaacaaattgagaaaaaacatgagaagtgcttttacaagtgtgattgctcagaaattgtgggcccatgtaaggttgactgcagcaattattagtttctccttccctcccccttcagaaacagacagcatgaatatttagtgattttattccatggataatttctttccgtattgagttgtcctccataatcgtgattcttttttaaaaaaaggaattaaaattatttcaaagaaagtgtcactatgatgatagaaaggaacaaagaaataggagcatctataaaaactagaaaacaatctggaaagactggacaaaatgatggaggagtactttggcaacaatcacattaatctagcgaaggtcaaagaagagacatcatgaactcaaaccgaagaaattcacatgtgaattctgagcatgagtcttagaaacagactttagtgtactgttattcacctttgtttcttccagaaagccatggcaaataacagcgcaaaattgtgatagcaggagaaatgtttgtaatttcatgggaacaatctgttttcaaacatcccaaactatcccaaatatagcaatagttttatgtaaatggtgcttgcaattataaacctttcttccctggccataaaatatgcctggcaaaatctcaactacccagaccttttctaggttagatttttctctatgtatccaggagcaaaactgttttcatttggaaatgttctataattcttaactcttacattctcgggctgatcttttctctaatgggtctcacttaatgaaattgtttgcctttagagacttggataaaacatttagcctatgtctagaaaagaggcaacaacaatctaccctagcttctttttacaaagaaaagactgggatagatttttttgtctctataaaaattatcccttgacatcatgttcaagggtcattatttattaaacatgtgcctactgtttgcctgccaattgttaatgctttctgactcacatttatccattatctggccttgtaaaggcaagaaagggagaatgtgacccaggctcagggaagggagtgtacctgcttgaacacctaatatatgtgtcaggcacctcatattgtatattataatcattgccaagaaacctgtgatggcaggcattattattcccattatcctggtaaggaaaactgaagcccaaaataattagattgcttgatatcatatagccagggagtggcaatgtctgccttacagcattcatcttcccactacttggatcttcatattggaggaacacaagtagaatgtaggagccatcacatagaagttcaggctctgcttctgatctgctggcagtaataatttatactcagcaatgtttctagaaaaaataaataatagtgaaagcctttctgggagctttcaatgagactgttcatcccagccctgaacttgcagctggccagtcctaggtccctgctgcccatctcctagcaattccggaaaggactgagagggagtcaggcagaaaagactggccacagtggcccaccaaagaggacagtgtggccacagattaggatgtgcctgatagttttaagtggtggcacctcctgggtttgggtacaaaagatcctgggagtagcaggttcatttataatcttcatggaagactaagtttctctaaaatttggagtaaaggctgtagagcaaacaggcaaaagaccagttgatagtggaaacagactgcctggtggaatctctatgagaactgaggcatgccaggctttgaagtgagagagacctggtttccaattccagctccatggcttgccgaatgagtgactttgaggaagttcagtaacttccttctttgtgcctcagtttcttcccatgcaaaatagagctgtctacctgagggtatgggtatgggtgttggtgatttgtaaagcatccagcggtgtccagcacataatagccatttaatagaagatattatgatcttgatgataaagttataaactaagcaggtgtttagactcaattttctatttcagtcacaactgagatctcaataactgctgggatctcctatagccttaaaagattaggaaaatgaaccttattgtagttcttgttaagcacagggtggggcagaagagcaaagtaaatgtaagccactgtgctgggtgctaacagggaggataaaagtaaaagagaaacagccccgatatctgtctaaccttccttcccagatgagtggaggaaggaggggctggagggggatgagttttggacttgggccagggaggggatttcaggaatggagggtgggaaagcaaactggcagggaagacctggaaagtctcagttgggtgaggagtgggggatgctggccccaggccagggcatggaaccagggcatgactatctgaaccggtaagggccacaggagcaggtggggaactggaagagcaacaacaaaggataaggaggaagaggtttgggagacaaaacctaggaaaagaggacctggtatgctaagggctgagtcctaacagcttcctaacaggacccccaagccatcttctactgctacccaccaagctcatggtgtgataggagaaatggagggagtcaggaaaattgtgtttataatacaatagacttcttgagagatataatttgatttttttaaaaggaacaaatttatactgagtgcctaccatgtccaggtgctgtggaaggtgctggagactctaaagtggaaagaaagaaaaaagagacaatttttttgccttcatgatgcttacaagaaaatggggagagagggaggaggggtgttctgtgcacaaagatcagtttgtatctgtttgattcatgaccggagtgaagggaccagtttctagttggagtgagctgagttcccatccaccctttcaaagcccccaccatctctctgctgctttgttccctggttgcaattttcttggtgccctcagcctagcacagatcttttggaggttgacctgggtccctgaagatgagcggagttatgaggctgcccgtggggaaagaatgggagaagaagcatgggtgaatcttgttcctgaggttatagagggtgtttcaagaggtgccatggaaataagggtgcatagtgttcactgctgcgaaaaaggcaaaatacttttccactctgtcggagtaaaatcgcaaaaatgctcttctagggtgggacaggtgggtctttattctgatgctaatggtgacatctggtcagtcaaggctcttggaagattcagctctgcataagcttggggatggtgaagctaatgtcccaagaagcccacaagaaaaagttagacttgtatgtctatggatatggtcaggggtttctgaggcaaatcaatgtagataaggaagtctgtgagttggcatatgcttgaggaaaacatggtatcaggaggcaggtattatactggtttaggtcagggctttggtttcagatagaccttggtttgattccagctctgcattttaccacctatgtgagtttgggcaagttactggaactctctaaagcttgagtttccttatctgtcctaatagtgtagatcataacagtactttcttgtagggttgttgtaaggatgaaataactcacattgcaagtgctcaataaatgttcttattagcgaaatgatggttatctagtgattcatctagagcacagccctcaaacttgaatgggtccagagacctgctactcaaagtgtgggcaccagcccagtaggactgacatcaactggaatctgatgggaaatgcagaatctcaggctctaggccagaactactcaatcagaacttgccttttaacaagatcctagatgattcacacgcacattccagtctgagaagctctgatccggaagagatcaggagatgttcaagtgctgaaacacaagtaaggcatggcagaagctaaaatgtgaagtattgagagtaaaccaggagagcagatggttattccttccatcccttaaggatcttatctttcaaacttctgctttaccacttcaacacacaaaacagagatagatttccttctaggagtgtgtgtgtgtgtgtgtgtgtgtgtgtgtgttgagaacatcaatggttcaataattgcttcatagtcttttcttccaggaaagagcatttgaatttggctacagagaatagataggtgggattttattaggcagagcaaggtggaaaggacatatttgggagacagaagacataagcaaaggcaagaggcaggagaattcagggcactttcttggactcctaagtagttaagtttgactggagtagggagtgggtagtagagtgatgagaatagttgtaagtaagactggaaatacatgtgaaacctgggtcatgaagggccttgactcctcttcaagattttggattttattctgaactactgaaggcatttattgtacatgtctgtgcattcttcttgcacaaacagtccagctcccaaggaagaggggcccagcccattggaggtggccccacgtccttcagtgcctggagttcttgtccttcagagtgggctgggggtggagctggacatcctgaaaacttttagtgagattgcaatcagatgagctcatttacaaatggccctacgctgttgacttggtcattttatggacagtgctaatggcccagtcagttaggcctacgtttggttcacctgtgtatacatcacttggatattatgtcccatatcattgttggcccttctgagttaagttcgttggcacagatttactttgtccacccagactgaaactgcacctctgaagactccatcacggaaggtgactctgtgaataactgcttagtcaacctaatagatgatctagatgagagattagcaaatttaacactactccaaggtgaggtatcaagcagctcttcccacatacagggagatggggggagaacagactaaggaagatcttggactctctctctcattagagaaatgggggtgggaattagggactagcctgtgtactactgacctatggcatagtctctcaaaacccatttcagagccaggcacagtggtacatgcctgtagtcctggctacacaggaggctgaggcaggaggatcccttgagctcaggagtttaaggctgtagtgtgctatgatcatgcctgtgaataaccactgcactgcagcctggacaacatagcaagactctgtctctaaaaacaaaacaaaacaaacaaacaatcatttctgatagtttactttgcctgtcaaaatgaagagcaggtaggatagaatcaaaagctttaaaaaaatcaaaacagcttacagctgctattttctctctgcctctgcgatcattcagagaaaataaattcactggtctagtccaacttattcttccctaagccctgctgttttttttttctagtatttcatattgccttggtggttgctaagtgattgttggatttagccccagtatattctcagataactatgccaataatctataattaccagaattcatcttttctcccttttggaaagatggactggctatttttttcttgtaaaccttgggtgtttaattctgccctacaggatgatgtcagagataatagctggtgagtctttaataataactgcgaattcctacaatattgtaaggtaaacgtcaaaaggtttcatgcatatatatgtatcttttaatctttcatttgaacagtttcactttttatgatcttgctgttggttctggaattataggacaaatttttcttttcttttcttttctttttgagacagggccttgctctgtcactcatgctggagtacagtggcttgatcatagcttcctgcagcctctaattcctgggttcaagtgatcctcctgcctcagctgccaaagtagctgggactacaggtgcacatcaccacgcctggttaactttttatttttttttttagagacacggtcatgctatgttgcccaggctggtctcaaactcctggggtcaagtgatcctcctgcctcagactccaaagtgttgggattataggcatgagacaatacacctggcccaggggatttttttctccatcacttaacatgaaattcaccaagcaaaacctcttacataaccatgggaccaataatctcagattctccattcccctccccaccttgatattaggattatgcagcttaatgagtcaagctgtcccaccctacccacctattactcccactcccaggataccaggagttttgtatgggatacataaatgatccttttttccattccgttaagctgtatgcaaattgtgtgtgtgcttatgtacatttttctggggataactttggtagttttcatcagattcttaaaggtgtctgtttgctaaagccagattaagagctactataaagaacacatagcctccgttattccagcccaatctttggaaatagagattatcagaatgggtacatcctaatatttgccgcaaatgactctgaagatgcggatgcaattacataaatcccaggctccttcaacatataaacccagaagtgtgatttcagggccccagacatgccctgtctctacttcattctcttgtcccaaattgcagcacccagaatatttcttcctaagcattactcaggctatcctattttcttattcagaaactatattcctgttctttagctatttcctgcacaaatcaatttcttttttttttttttttttttggtagtcattttaatttacttcttggtttcaatttggattgactttctgcattttgctactggtagaattgcaatgcattgggccagtggtagaccactacctgtcaggagaaatttcttttgttctttggtttttactcgcacatcacagtgatgggcgtcattcagtggttctaaaccctcagtacacttagaaatcacctaagaagctttgaaaaccatgaaagcctggtccctatctccaaggattttaattcaatcgatctgaatgaggcctgggtgttgacttaaaaaaaatgcaacatgcattgagccactggtctaatctagcaggaattggcaacgagtgtgagggtctttcaaaagatgctgttttacctggctaaggttgtggcatgcccacagagtaaccacctccttttctttccccagatggtgctcctggccaggtgcgaggggcactgcagccaggcgtcacgctccgagcctttggtgtcgttcagcactgtcctcaagcaacccttccgttcctcctgtcactgctgccggccccagacttccaagctgaaggcactgcggctgcgatgctcagggggcatgcgactcactgccacctaccggtacatcctctcctgtcactgcgaggaatgcaattcctgaggcccgctgctgtgtgtggcttctggatgggacaactgtagaggcagttcgaccagccagggaaagactggcaagaaaagagttaaggcaaaaaaggatgcaacaattctcccgggactctgcatattctagtaataaagactctacatgcttgttgacagagagagatactctgggaacttctttgcagttcccatctcctttctctggtacaatttcttttggttcattttcagattcaggcattttcccccttggctctcaatgctgtttgggtttccaacaattcagcattagtgggaaaaagtgggccctcatacacaagcgtgtcaggctgtcagtgtttggtgcacgctggggaagaatttactttggaaagtagaaaagcccagcttttcctgggacatcttctgttattgttgatgtttttttttaccttgtcattttggtctaaggttgccattgctgctaaaggttaccgatttcaaagtccagataccaagcatgtggatatgtttagctacgtttactcacagccagcgaactgacattaaaataactaacaaacagattcttttatgtgatgctggaactcttgacagctataattattattcagaaatgactttttgaaagtaaaagcagcataaagaatttgtcacaggaaggctgtctcagataaattatggtaaaattttgtaagggagcagacttttaaagacttgcacaaatacggatcctgcactgactctggaaaaggcatatatgtactagtggcatggagaatgcaccatactcatgcatgcaaattagacaaccaagtatgaatctatttgtgggtgtgctatagctttagccgtgtcacgggcatcattctctaatatccacttgtccatgtgaaacatgttgccaaaatggtggcctggcttgtcttctgaacgtttggttcaaatgtgttttggtcctggaggctcaaattttgagttattcccacgttttgaaataaaaagagtatattcaaaa

SEQ ID NO: 23 - protein, 107 aa, Mus musculus
KTDSSFLMDSQRCMRHHYVDSISHPLYKCSSKMVLLARCEGHCSQASRSEPLVSFSTVLKQPFRSSCHCCRPQTSKLKALRLRCSGGMRLTATYRYILSCHCEECSS

SEQ ID NO: 24 - DNA, 321 bp, Mus musculus
  source 1..321: mol_type = other DNA
aaaacagacagttcatttctgatggactctcaacgctgcatgagacaccattatgtcgattctatcagtcacccactgtacaaatgtagctcaaagatggtgctcctggccagatgtgaggggcactgcagccaggcatcacgctctgagcccttggtgtccttcagcactgtcctcaagcaacctttccgttcctcctgtcactgctgccgaccccagacttccaagctgaaggctctgcgtctgcgctgctcagggggcatgcgacttactgccacttaccggtacatcctctcctgtcactgtgaggaatgcagctcc

SEQ ID NO: 25 - protein, 133 aa, Macaca mulatta
MRKHVLAASFSMLSLLVIMGDTDSKTDSSFIMDSDPRRCMRHHYVDSISHPLYKCSSKMVLLARCEGHCSQASRSEPLVSFSTVLKQPFRSSCHCCRPQTSKLKALRLRCSGGMRLTATYRYILSCHCEECNS

SEQ ID NO: 26 - protein, 107 aa, Rattus norvegicus; identical to SEQ ID NO: 23

SEQ ID NO: 27 - protein, 109 aa, Pan troglodytes
KTDSSFVMDSDPRRCMRHHYVDSISHPLYKCSSKMVLLARCEGHCSQASRSEPLVSFSTVLKQPFRSSCHCCRPQTSKLKALRLRCSGGMRLTATYRYILSCHCEECNS

SEQ ID NO: 28 - protein, 2365 aa, Homo sapiens
MEEVPGDALCEHFEANILTQNRCQNCFHPEEAHGARYQELRSPSGAEVPYCDLPRCPPAPEDPLSASTSGCQSVVDPGLRPGPKRGPSPSAGLPEEGPTAAPRSRSRELEAVPYLEGLTTSLCGSCNEDPGSDPTSSPDSATPDDTSNSSSVDWDTVERQEEEAPSWDELAVMIPRRPREGPRADSSQRAPSLLTRSPVGGDAAGQKKEDTGGGGRSAGQHWARLRGESGLSLERHRSTLTQASSMTPHSGPRSTTSQASPAQRDTAQAASTREIPRASSPHRITQRDTSRASSTQQEISRASSTQQETSRASSTQEDTPRASSTQEDTPRASSTQWNTPRASSPSRSTQLDNPRTSSTQQDNPQTSFPTCTPQRENPRTPCVQQDDPRASSPNRTTQRENSRTSCAQRDNPKASRTSSPNRATRDNPRTSCAQRDNPRASSPSRATRDNPTTSCAQRDNPRASRTSSPNRATRDNPRTSCAQRDNPRASSPSRATRDNPTTSCAQRDNPRASRTSSPNRATRDNPRTSCAQRDNPRASSPNRAARDNPTTSCAQRDNPRASRTSSPNRATRDNPRTSCAQRDNPRASSPNRATRDNPTTSCAQRDNPRASRTSSPNRATRDNPRTSCAQRDNPRASSPNRTTQQDSPRTSCARRDDPRASSPNRTIQQENPRTSCALRDNPRASSPSRTIQQENPRTSCAQRDDPRASSPNRTTQQENPRTSCARRDNPRASSRNRTIQRDNPRTSCAQRDNPRASSPNRTIQQENLRTSCTRQDNPRTSSPNRATRDNPRTSCAQRDNLRASSPIRATQQDNPRTCIQQNIPRSSSTQQDNPKTSCTKRDNLRPTCTQRDRTQSFSFQRDNPGTSSSQCCTQKENLRPSSPHRSTQWNNPRNSSPHRTNKDIPWASFPLRPTQSDGPRTSSPSRSKQSEVPWASIALRPTQGDRPQTSSPSRPAQHDPPQSSFGPTQYNLPSRATSSSHNPGHQSTSRTSSPVYPAAYGAPLTSPEPSQPPCAVCIGHRDAPRASSPPRYLQHDPFPFFPEPRAPESEPPHHEPPYIPPAVCIGHRDAPRASSPPRHTQFDPFPFLPDTSDAEHQCQSPQHEPLQLPAPVCIGYRDAPRASSPPRQAPEPSLLFQDLPRASTESLVPSMDSLHECPHIPTPVCIGHRDAPSFSSPPRQAPEPSLFFQDPPGTSMESLAPSTDSLHGSPVLIPQVCIGHRDAPRASSPPRHPPSDLAFLAPSPSPGSSGGSRGSAPPGETRHNLEREEYTVLADLPPPRRLAQRQPGPQAQCSSGGRTHSPGRAEVERLFGQERRKSEAAGAFQAQDEGRSQQPSQGQSQLLRRQSSPAPSRQVTMLPAKQAELTRRSQAEPPHPWSPEKRPEGDRQLQGSPLPPRTSARTPERELRTQRPLESGQAGPRQPLGVWQSQEEPPGSQGPHRHLERSWSSQEGGLGPGGWWGCGEPSLGAAKAPEGAWGGTSREYKESWGQPEAWEEKPTHELPRELGKRSPLTSPPENWGGPAESSQSWHSGTPTAVGWGAEGACPYPRGSERRPELDWRDLLGLLRAPGEGVWARVPSLDWEGLLELLQARLPRKDPAGHRDDLARALGPELGPPGTNDVPEQESHSQPEGWAEATPVNGHSPALQSQSPVQLPSPACTSTQWPKIKVTRGPATATLAGLEQTGPLGSRSTAKGPSLPELQFQPEEPEESEPSRGQDPLTDQKQADSADKRPAEGKAGSPLKGRLVTSWRMPGDRPTLFNPFLLSLGVLRWRRPDLLNFKKGWMSILDEPGEPPSPSLTTTSTSQWKKHWFVLTDSSLKYYRDSTAEEADELDGEIDLRSCTDVTEYAVQRNYGFQIHTKDAVYTLSAMTSGIRRNWIEALRKTVRPTSAPDVTKLSDSNKENALHSYSTQKGPLKAGEQRAGSEVISRGGPRKADGQRQALDYVELSPLTQASPQRARTPARTPDRLAKQEELERDLAQRSEERRKWFEATDSRTPEVPAGEGPRRGLGAPLTEDQQNRLSEEIEKKWQELEKLPLRENKRVPLTALLNQSRGERRGPPSDGHEALEKEVQALRAQLEAWRLQGEAPQSALRSQEDGHIPPGYISQEACERSLAEMESSHQQVMEELQRHHERELQRLQQEKEWLLAEETAATASAIEAMKKAYQEELSRELSKTRSLQQGPDGLRKQHQSDVEALKRELQVLSEQYSQKCLEIGALMRQAEEREHTLRRCQQEGQELLRHNQELHGRLSEEIDQLRGFIASQGMGNGCGRSNERSSCELEVLLRVKENELQYLKKEVQCLRDELQMMQKDKRFTSGKYQDVYVELSHIKTRSEREIEQLKEHLRLAMAALQEKESMRNSLAE

SEQ ID NO: 29 - DNA, 7098 bp, Homo sapiens
  source 1..7098: mol_type = other DNA
atggaggaggtgcctggggatgccctgtgtgaacactttgaggccaacatacttacccagaaccgctgtcaaaactgcttccaccctgaggaggcccatggagcaagataccaggagctcaggagcccttcaggtgctgaggtgccctactgcgacctgcctcgatgtccacctgcccctgaggacccactcagcgcctcaacctccggctgccagtctgtggtggacccaggcctcaggccagggcccaagaggggcccatccccctcagcagggctcccagaagagggtcccacagctgcccccaggagcaggagccgggagcttgaggcagtaccctatctggagggcctgaccacttccttgtgtggcagctgcaacgaggaccccggctctgaccccacctccagccctgactccgccacccctgatgataccagcaactcgtcctctgtggactgggacactgttgagaggcaggaggaggaggcccccagctgggacgagctcgcagtgatgatcccgaggaggcctcgggaggggccgagagctgacagctcccaaagggctccgtctctcctcaccaggtcccctgtgggaggagatgctgcaggccagaaaaaggaggacaccggcggtgggggccggagcgcaggacagcactgggcaaggctccggggagaaagcgggttgtccctggagcggcaccggtcaacactgacccaggcttcctccatgacaccacacagtggacctcgaagcaccacgtctcaggcttctcctgcccaaagggacactgctcaggctgcctctacacgtgaaatccccagagcctcctctccccatcgaatcacccaaagggacacctccagggcctcatccacccaacaggaaatctccagggcctcatccacccaacaggaaacctccagggcctcatccacccaagaggacacccctagggcctcatccacccaagaggacacccccagggcctcatctacacagtggaacacccccagagcttcctctccctcacgaagcacccaactggataaccccagaacctcttctacccagcaggacaacccccaaacttcttttcctacttgtactccccagcgggaaaaccccaggacaccctgtgtccagcaggacgatcccagagcctcctctcccaacagaaccactcaacgagagaattccagaacatcctgtgcccagcgggacaatcccaaagcctccagaacctcctctcccaatagagccacacgagacaaccccagaacatcctgcgcccagcgggacaatcccagagcctcctctcccagtagagctacacgagacaaccccacaacatcctgtgcccagcgggacaatcccagagcctccagaacctcctctcccaatagagccacacgagacaaccccagaacatcctgtgcccagcgggacaatcccagagcctcctctcccagtagagctacacgagacaaccccacaacatcctgtgcccagcgggacaatcccagagcctccagaacctcctctcccaatagagccacacgagacaaccccagaacatcctgcgcccagcgggacaatcccagagcctcctctcccaatagagctgcacgagacaaccccacaacatcctgtgcccagcgggacaatcccagagcctccagaacctcctctcccaatagagccacacgagacaaccccagaacatcctgtgcccagcgggacaatcccagagcctcctctcccaatagagctacacgagacaaccccacaacatcctgtgcccagcgggacaatcccagagcctccagaacctcctctcccaatagagccacacgagataaccccagaacatcctgtgcccagcgggacaatcccagagcctcctctcccaacagaaccacccaacaagacagccccagaacatcctgtgcccgacgggacgatcccagagcctcctctcctaacagaaccatccaacaagagaaccccagaacatcctgtgccctacgggacaatcccagagcctcctctcccagcagaaccatccaacaagagaaccccagaacatcctgtgcccaacgggacgatcccagagcctcctctcctaacagaaccacccaacaagagaaccccagaacatcctgtgcccgacgggacaatcccagagcctcctctcgcaacagaaccatccagcgagacaaccccagaacatcctgtgcccagcgggacaatcccagagcctcctctcctaacagaaccatccaacaagagaacctcagaacatcctgtacccgacaggacaatcccaggacctcctctcccaatagagccacacgagacaaccccagaacatcctgtgcccagcgggacaatctcagagcctcctctcccatcagagccacccaacaggacaaccccagaacttgtattcaacagaacatccccagatcatcttctacccaacaagacaaccctaaaacctcttgtaccaaacgagataacctcagacccacttgtacacagcgggaccgcacacagtccttttcctttcaacgagacaaccctggaacctcctcatctcaatgctgcacccaaaaggagaatctgagaccatcatctccccaccgctccactcaatggaacaatcccaggaattcatctccccatcgtactaacaaagacatcccctgggcctcgtttcccctccggccaactcagagtgatggtccccgaacctcttccccatctcgctccaagcaaagcgaggttccctgggcatccatcgccctccggccaacccaaggtgacaggcctcagacatcctctcccagcaggccagcccagcatgacccaccccagtcctcctttggccccacccagtacaacttgccatcccgggccacctcttcctcccataacccaggccaccagagcacctcccgaacttcctcacctgtgtaccccgctgcctatggggctcccctgacctctcctgagccctcccagcctccatgtgctgtgtgcattgggcaccgggatgcccctcgagcctcttcgccccctcgctatttgcagcacgaccccttccccttcttcccagagccccgcgcccctgagagtgaaccgccccaccacgagcctccctatataccacctgctgtgtgcattggacaccgagatgccccccgggcgtcctcgcccccccgccacacccaatttgaccccttccccttcctcccagacacatcagatgccgagcatcagtgtcagtccccccaacacgagccccttcagctccctgcacctgtgtgtattgggtaccgagatgcaccccgggcctcctccccaccacgccaggccccagagccttccctcttattccaggacctccccagggccagcacagagagccttgtcccttccatggactctctgcacgagtgcccccacatccccacccctgtgtgcattgggcaccgggatgcaccctccttctcatccccaccacgccaggctcctgagccatccctcttcttccaggatccccctggaactagtatggagagcctggccccctccactgactctctgcatggctccccagtgctgatcccccaagtgtgcatcgggcaccgggatgcaccccgagcctcctccccaccccgccacccacccagtgacctagcgttcctggcaccctcaccttcaccgggcagctctgggggctcccggggctcagcgcctcccggggagaccaggcacaacttggagcgggaggagtacactgtgctggccgacctgcccccacccaggaggctggcccagagacagccagggccccaggcgcagtgcagcagcgggggccgcacccacagccctggccgtgcagaggtggagcgcctcttcgggcaagagcgcaggaagtccgaggcagcgggggccttccaggcccaggacgagggacggtcacagcagcccagccaaggccagagccaacttctccgaagacagtccagccctgcccccagcaggcaggtgaccatgctccctgccaaacaggcagaactgacccggcggagccaagcagagccccctcatccttggagtcctgagaagagacctgagggagatcggcagctccaggggtccccgctgccccccaggacatcagccaggacccctgagagggagctgcggacacagagacctctggagagtggccaagcaggcccaagacagcctctgggggtgtggcagagtcaggaggaaccgccagggtcccagggccctcatagacacctagaaaggagctggagcagccaggagggaggcctgggccctgggggctggtggggatgtggagagcccagcctgggggcagccaaagccccggagggagcatgggggggcacttccagggagtacaaggagagctgggggcagccagaggcctgggaggagaagcccactcatgagctccccagagaactaggaaagagaagcccactcacgagcccccctgagaactggggaggccccgcagagtcctcacaatcctggcactctgggacacccactgctgtgggctggggggcagagggagcgtgtccatacccgcgtggctctgagaggcgacccgagcttgactggagggatctgcttggccttctccgggcaccaggagagggggtctgggcccgtgtccccagcctggactgggagggcctcttggagctcctgcaggccaggctgccccgcaaggacccagctggacacagggatgacctggccagggctttagggccagagctgggtcccccaggcacaaacgatgtccctgagcaggagtcacacagccagccagaaggctgggccgaggccaccccagtcaatggacacagccccgcactgcagtcccagagcccggtccagctgcccagccctgcctgcacctccacccagtggccaaagatcaaagtgacaagaggaccagcgaccgcaactctggcaggcctggagcagacgggccccctggggagcaggagcactgcgaagggccccagcttgccagagctgcagttccaaccagaggagcctgaggagtcagaaccaagcagaggccaagaccccctgactgaccagaagcaggcagactcggcagacaagaggccagcagagggcaaggctgggagcccgctcaagggccgactggtgacctcatggcggatgcccggggaccggcccacgctgttcaatccgttcctgctgtctctgggggtcctcaggtggcgaaggcccgatctgctcaacttcaagaagggatggatgtcgatcttggacgagcctggagagcctccctccccctcgctcaccaccacctctacttcgcagtggaagaaacattggtttgtgctgacagattcaagtctcaaatattacagagactccactgctgaggaggcagatgagctggatggtgagatcgacctgcgttcctgcacggatgtcactgagtacgcggtgcagcgcaactatggcttccagatccacaccaaggatgctgtctataccttgtcggccatgacctcaggcatccggcggaactggatcgaggctctgagaaagaccgtacgtccaacttcagccccagatgtcaccaagctctcggactctaacaaggagaacgcgctgcacagctacagcacccagaagggccccctgaaggcaggggagcagcgggcgggctctgaggtcatcagccggggtggccctcggaaggcggacgggcagcgtcaggccttggactacgtggagctctcgccgctgacccaggcttccccgcagcgggcccgcaccccagcccgcactcctgaccgcctggccaagcaggaggagctggagcgggacctggcccagcgctccgaggagcggcgcaagtggtttgaggccacagacagcaggaccccagaggtgcctgctggtgaggggccgcgccggggcctgggtgcccccctgactgaggaccagcaaaaccggcttagtgaggagatcgagaagaagtggcaggagctggagaagctgcccctgcgggagaataagcgggtgcccctcactgccctgctcaaccaaagccgcggagagcgccgagggcccccaagtgacggccacgaggcactggagaaggaggttcaggctcttcgggcccagctggaggcgtggcgtctccaaggggaggctcctcagagtgcactgagatcccaggaggatggccacatccccccgggctacatctcacaggaggcatgtgagcgcagcctggcagagatggagtcctcgcaccagcaggtgatggaggagctgcagcggcaccacgagcgggagctgcagcgcctgcagcaggagaaggagtggctcctggctgaggagacggcagccacggcctcagccattgaagccatgaagaaggcctaccaggaagagctgagccgagagctgagcaaaacacggagtctccagcagggcccggatggcctccggaagcagcaccagtcagatgtggaggcactgaagcgagagctgcaggtgctatcggagcagtactcgcagaagtgcctggagattggggcactcatgcggcaggctgaggagcgcgagcacacgctgcgccgctgccagcaggagggccaggagctgctgcgccacaaccaggagctgcatggccgcctgtcagaggagatagaccagctgcgcggcttcattgcctcgcagggcatgggcaatggctgcgggcgcagcaacgagcggagttcctgcgagctagaggtgctgcttcgcgtaaaagaaaacgaactccagtacctaaagaaggaggtgcagtgcctccgggacgagctccagatgatgcagaaggacaagcgcttcacctcgggaaagtaccaggacgtctatgtggagctgagccacatcaagacacggtctgagcgggagatcgagcagctgaaggagcacctgcgtcttgccatggccgccctccaggagaaggagtcgatgcgcaacagcctggctgagtag

SEQ ID NO: 30 - protein, 593 aa, Homo sapiens
MTPDLLNFKKGWMSILDEPGEPPSPSLTTTSTSQWKKHWFVLTDSSLKYYRDSTAEEADELDGEIDLRSCTDVTEYAVQRNYGFQIHTKDAVYTLSAMTSGIRRNWIEALRKTVRPTSAPDVTKLSDSNKENALHSYSTQKGPLKAGEQRAGSEVISRGGPRKADGQRQALDYVELSPLTQASPQRARTPARTPDRLAKQEELERDLAQRSEERRKWFEATDSRTPEVPAGEGPRRGLGAPLTEDQQNRLSEEIEKKWQELEKLPLRENKRVPLTALLNQSRGERRGPPSDGHEALEKEVQALRAQLEAWRLQGEAPQSALRSQEDGHIPPGYISQEACERSLAEMESSHQQVMEELQRHHERELQRLQQEKEWLLAEETAATASAIEAMKKAYQEELSRELSKTRSLQQGPDGLRKQHQSDVEALKRELQVLSEQYSQKCLEIGALMRQAEEREHTLRRCQQEGQELLRHNQELHGRLSEEIDQLRGFIASQGMGNGCGRSNERSSCELEVLLRVKENELQYLKKEVQCLRDELQMMQKDKRFTSGKYQDVYVELSHIKTRSEREIEQLKEHLRLAMAALQEKESMRNSLAE

SEQ ID NO: 31 - protein, 1144 aa, Homo sapiens
MIPRRPREGPRADSSQRAPSLLTRSPVGGDAAGQKKEDTGGGGRSAGQHWARLRGESGLSLERHRSTLTQASSMTPHSGPRSTTSQASPAQRDTAQAASTREIPRASSPHRITQRDTSRASSTQQEISRASSTQQETSRASSTQEDTPRASSTQEDTPRASSTQWNTPRASSPSRSTQLDNPRTSSTQQDNPQTSFPTCTPQRENPRTPCVQQDDPRASSPNRTTQRENSRTSCAQRDNPKASRTSSPNRATRDNPRTSCAQRDNPRASSPSRATRDNPTTSCAQRDNPRASRTSSPNRATRDNPRTSCAQRDNPRASSPSRATRDNPTTSCAQRDNPRASRTSSPNRATRDNPRTSCAQRDNPRASSPNRAARDNPTTSCAQRDNPRASRTSSPNRATRDNPRTSCAQRDNPRASSPNRATRDNPTTSCAQRDNPRASRTSSPNRATRDNPRTSCAQRDNPRASSPNRTTQQDSPRTSCARRDDPRASSPNRTIQQENPRTSCALRDNPRASSPSRTIQQENPRTSCAQRDDPRASSPNRTTQQENPRTSCARRDNPRASSRNRTIQRDNPRTSCAQRDNPRASSPNRTIQQENLRTSCTRQDNPRTSSPNRATRDNPRTSCAQRDNLRASSPIRATQQDNPRTCIQQNIPRSSSTQQDNPKTSCTKRDNLRPTCTQRDRTQSFSFQRDNPGTSSSQCCTQKENLRPSSPHRSTQWNNPRNSSPHRTNKDIPWASFPLRPTQSDGPRTSSPSRSKQSEVPWASIALRPTQGDRPQTSSPSRPAQHDPPQSSFGPTQYNLPSRATSSSHNPGHQSTSRTSSPVYPAAYGAPLTSPEPSQPPCAVCIGHRDAPRASSPPRYLQHDPFPFFPEPRAPESEPPHHEPPYIPPAVCIGHRDAPRASSPPRHTQFDPFPFLPDTSDAEHQCQSPQHEPLQLPAPVCIGYRDAPRASSPPRQAPEPSLLFQDLPRASTESLVPSMDSLHECPHIPTPVCIGHRDAPSFSSPPRQAPEPSLFFQDPPGTSMESLAPSTDSLHGSPVLIPQVCIGHRDAPRASSPPRHPPSDLAFLAPSPSPGSSGGSRGSAPPGETRHNLEREEYTVLADLPPPRRLAQRQPGPQAQCSSGGRTHSPGRAEVERLFGQERR

SEQ ID NO: 32 - protein, 2365 aa, Homo sapiens; identical to SEQ ID NO: 28

SEQ ID NO: 33 - DNA, 79569 bp, Homo sapiens
  source 1..79569: mol_type = other DNA
cttccacctcccgagcatcgctctgattcattgttaaaataaagaggccatgaccctggcactcccaccccggcagcccctgtgcgtggaaacccagccaaggttagcactgggcctcagaaaagaggagctggtagggggaggcctacaggaggggtaggggtcgagggatccggggaggaactggctgaatgcctggatggagagggtcccgggtccattctctgggtggggcatgtgtagctgcttaaggttttgattattatatccacatctcaagtgcattttagagaaggattctgcctattggttgtgggtaggggaggaaacgggagcagcgaggggcacgtggagtagagccccctacccacccccaggaaaatgagcggcgttctcctgctaggcgacgctcctttatgtggccagaccaggagagaaacgcccaggacgggcggggccgatgcgcccctcttccaccaccaggagtcgggaggacgaccgcccggggaggatcagagaccctggggccacggaaggaccagtgggtagccctctccccaccgtgccttgctgtcgcccccaccgcattcccttctccaggtctgatgatggaggagccttggccctggctgtcccaggggaggaggtgaaattcctcagctctccaccaagattggccacaaaagcctgatcccctggaacacagcaggtgaggatggatgtgggcaggtgacctgggggcaccaaaagctgcaggtgttttgggatgttgggttcctcccaccccccaccctccccctggggctctgtgtgagtggggaggccatctttaagtgattctcctgacccagctccactccagggcatggatgttggtggccttaggggcacccagaaaggagaacccttgcacaagtaagataccagggcggccgggcgcggtggctcaagcctgtaatcccagcactttgggaggtcgaggtgggtggatcacaaggtcaggagttcgagaccagcctggcccatatggtgaaacctcgtctctaccaaaaatacaaaaaaattatccgggcatggtggcacatgcctgtaatcccagctatttgggaggctgcggcaggagaattgcttgaatccgggaggcagaggttgcagtgagccgagatcgcgccactgcactccagcctgggtgatagaccgagattctgtctcaaaaaaaaaaaaaaaaaaagaaagaaagacaccagggtttcagaagggtatgatgcttcacacctgtaatcccagcactttgagggaaggaggaggattacttgaggtcaggagttcaggagttcaaaaccagcctgggtaacactgcaagagccttttttttttttttttttttttttgagacacactgttgcccaggctggagtgcagcggggcgatcttagctccactgcaacctccacctcctgggttcaagcaattctcttgccccagcctcttgagtagctgggattacaggcatgcgcaccacgcccagctaatttttatagttttagtagagacagggtttcatcatgttgggcaggctggtcttgaattcctggcctcaagtgatctgcctgcctcagcctcccaaagtgctgggattataggcgtgagccaccgcacctggccaagagcccatttttacaaaataaaaaagaaaaaaattagctgggcgtggtggcgtacacctgtagtcccagttactcagtcccagagactgaggcaggagaatcatttgagcccgggagtttgaggttgcaaggagctatgatcgagccactgcactccagcctgggtgacagagcaagaccctgcccccacctccccaaaaaagacattaggggccggatgcagtggctcacacctgtaatcccagcattttgggaggccgaagggggcggatcacctgaggtcaggagttcacctggccaacatggcgaaaccccgttgctactaaaaatacaaaaattagccaggcatgacggtgcatgcctgtgatcccagatactactggggaggctgaggtagaattgcttgaacccaggaggcggaggttgcagtgagccgagtgagccaagatcacatcacggcactccagcctaggtgacagagagagacttcgtctcaaaaaaacaaaacaaaacaaaacgaaaacacattaggatttctttttggctaagttctgccacaaacttgctgtgtgactttaggctgttcacgtttgtcaaagacgtcgtcctcaactctgaaaatacctggccagctttttgcctccctcgctgtgcttcccaagggacctgtgcgagttggcagtatgatccagtgctcctcacttccacctccgagagagcagggacacacacagccctggatttgaatcagccactgcgaccttcagtgaccgaaggaacctctctgagccttagttgcctgatctaaaattggcattaatttgatctacaatgcagctataagacaaggacactcaaactttggggcgcactagaatcacctggggaatcactttttttttttaagacagagtctcactcttatcacccaggctggagtacagtggtgcaatcttggctcactgcaacctccgcctcctgggttcaagtgattctcctgcctcagcctcccgagtaactgggactacaggtgcataccaccatgcctggctaattttgtatttttagtagagacagggtttggcaatattggccaggctggtctcgaactcctgacctcaggtgatctgcccgcctcggcctcccaaagtgctgggattataggcgtgagccactgcgcctggccaggaatcgcttctttattttcattttcatttatttatttatttatttatttattttgagatggagtctcgctctgttgctcagtctggagtgaagtggcgtgctctccgctcactgctacctctgcctcccaggttcaagcgattctcgtgcctcagcctcccaagtagctgggactacaggtgcgtgctaccacgcccagctaatttttgtatttagtagaggcggggtttcaccatgttggccaggctggtcttgaactcctggcctcaagtgatctgcctgcctcagcctcccaaagtgctgggattacaggcgtgagccaccgccctcggctggaatcacttctttaacatgcacagccccagacctcagtctcttggagattctaactgtgtgaattgggagagagaaaggggaatctagattttttttttttttttttgagatgtggtcttgctatgttgcctaggctggagtgctgtaactattcacaggtgcagttatagcacactaccacctcaaactcctgggctcaagagatcctcccacctctgcctcccgagtagcttggactgcaggtgcacaccatcttacccagctgaaatctgctttttttttttctcagtgcagtggcacagtcatggctcactgcagcctcgacctcccagactcaggtgatcctcccaacttcagcctcctgagtagcagggaccacaggcctgcaccaccttgcccagctaatttttgtattttttgtagagacggagtttcgccagttgcccaggatggtcttgaactcttgggctcaaatgatccgccgcccgcaatgggcccagctggaatctgcatttttttgttttttgttttgagatgaagtctcactctgtcgcccaggctggagtgcaatggcgcaatcttggctcactgcaacctccgcctcctgggttcaagccattctcctgcctcaggctcccaagtagctgggattacaggcacgtgccatcacacttggctgatttttgtatttttagtagagacagggttttaccatattggccaggctggtctcgaactcctgacctcaagtgatcggcccacctcggcctcccaaagtgctgggattacaggcatcagccactgtgcctggcctggtatctgcatttttatgaacagcccaggagggtgtaatgcagagtccttggcgtgcactttcagcaacactgcagtaaggactagaaatcgcacatcaaatgctggcagagtgcctggtgcttagtaggtgcttagtgagtgtttgttgagtgaataaatgaacaggaatggatggagaacaggaacccaaaggaatggatgagtaaccttatttccttggtccttgtctggaaactggggcaactggggctggggttcaggtgagtggccagccagtcatctggtctttgcctccccctcatttttgccaggcctcacatagacggtcagccattggatcataggaactgccctggcctgactcacccaatatggaggaggtgcctggggatgccctgtgtgaacactttgaggccaacatacttacccagaaccgctgtcaaaactgcttccaccctgaggaggcccatggagcaagataccaggtgggccagttttccacgtggttggggtggtttgtgatgggggcatgggtgaaggactgggcctgtggtgtccgctaactcgcagttgaacccagatgctggacttcctcctgtcgagagcctcggttttcccacattgcagggaagtggttgaaccatgtgaatgtttcacaatcttcagtcactttcctcctgcttatatgatacgattgttaccatagccttatctaatctgttacttactttgttattctttaaatcaacatctttttccccttctattgaaacaaaacttcacatcatcaacacaagtagaaaactagaattacttcctgttaagaagaagaggttaagaagaaaggtagaggctgggcacggtggctcacgcctgtaatcccagcactttgggaggccgaggtgggtggatcacccgaggtcgggagtttgaaaccagcctggccaacatggtgaaaattagctgggcatggtggtgcatgcctgtaatcccagctacttgggaggctgaggcaggagaatcacttgaacctgggaggcggagattgtggtgagccgagatcgcgccattgcactccagcctgggcaacagaatgaaactgtctcaaaaaacaaaacaaaacaaaacaaaaaagagaagaaaggtagaaaaagaaaaaacaaaacagaaatgtcgttacaccctaacttgagagtgttttctttttctttttcttttttttgagacagagtctcactctgtcgcctgggctagagtgcaatggcaatggtgtgatctcagctcactgcaatctctgcctcctaggttcaagcgatcctcccgcctcagcctcccaagtattgggattacaggtgcctgccaccatgcccagctaatttttgtatttttagtagaaacggggtttcgccatattggccaggctggtcttaaactcctgacctcaggtgatccacccgcctcagcctcccaaagtgttgggattacaggcgtgagccaccgcgcctggcctcgagagtgttttctatggaaggctctgagcttgcatcctgctgtctctttgtcaaaaagggagattagcagatgttagagagatgttaagaatacaccagcatcatctagagattttctttctctctctcttttttttttttttttttttttttggagatagggtcttgctctgtagcacaggctggagtgcagtggtccaacctatagtacatggctcactgtagcctcgacctcccaggctcaaatgatcttcccaccttggcctcctgagtagcagggactacaggcacatgccaccatggccagctaattttcttgtaaagatgggatctcactatgttgccagggctggtctcaaattcctgggctcaggtgatcctcccacctcaacctctgtaactgcagggattacaggtgtgagacactgcacctggtctcaagattttcttcttcaagttattgaaggagtgaagaagaatccttttttttctttctttttttttcatttgagacggagtctctctctgtcgccaggctagagttcagtggctcaatctcagctcactgcaacctccgtctcctgggttcaagcaattctcctgcctcagcctcctgagtacctgggattacaggtgcccaccaccatgcccagctaatttttgtatctttagtagagacagggtttcaccatgttggtcagtctggtctcgaactcctgaccttgtgatctgtctgcctcggcttcccaaagtgctgggattacaggtgtgagccaccgcgcctggccgagattttcttcttcaagttattgaaggagtgaagaagagtccttttctgactttgtgattgatgtagtctgctgccaagcccccatgcatgtaaacacagagcacctgatacacacgcaatgagaaacctgggactcacgaacctccgagggcccttccaaccttgaccaccatggcttcgtcattcccattggggtctgaaggtcctctttttttttttttttttttgagacagagtctcgttctgttgcccaggctggagtacagtggtgcgatctgggctcactgcaagctcggcctcccaggtttatgccattctcctgcctcagcctcatgagtagctgggacaacaggcacccggcaccacgcccagctaattttttgtctttttagtagagacagggtttcaccatgttagccaggatggcctcgatcttcctgacctcgttattcgcccacctcgacctcccaaagtgctgggattacaggcatgagccaccgcgcccagcttctaccagtcttgatacctccaataatagctctcttgtgctcacctgcaagttcaggttcagggaacagatgcctgggagtccatctttcatgcaaatgactttcttccagtggttgggaagatggcaagaatggaacaggagagccgtggattcaggctcgtctgagttctagtctcaatcccaccatttcccacccgagaccgtgggtcagctcacaaattcatacgtactgaataggtgcttaaaatgtgccaggcattatgctagatgatggggaaatcatgataaatcagaaaggcacagccaggcacagtgactcactcctgtaatcccagcactttgggaggccaaggtgggtggatcacttggagtttgagaccatcctggcaacatggcaaaaccccatctctacaaaaaatttaaaaaattagctgggcgtagtgggatgcggctatagtctcagttactcaggaggctgaggtgggagaatcacctgagactgggaggcgggggcttcagtgagccgtgatcgcattactgtatttcagcctgggtgacagagttggaccctgactcagaacagaacagaacagaacagaacagaacagaacagaacagaacagaacagaacagtacagaaaacagggagaaggaggggaagggggaggggaagggggagggggagagagaggaggagaggaggagagagggacacatccctggcttgtcttcatggggcttatattctagcaagagaaatgcacatgattatttaatcttggttgtgataaatgtataaaggaacagtaagtggcatgaaggtaaaggatagggcattagggaaagtttctccaaaaaaaaaaaaatgacatttcagctgcttagtaaaggctgtgcaggcattagcattagtgaaattgcaggaagaggagaggaaggaaggagaatgtgcaaaggccagcctggcacggcagctcacgcctgtaatcccagcactttgggaggaagtgcttggattgaggcaccgaagcaggaagatcacttgaactcaggagtttgagaccagcctgggcagcacagtgagaccccatttctaccaaaaaaaaaaaaaaaaaaattagccaggcaggatggtgcacacctgtagtcccagctagtcagaaggctgatgtgggaggattactggatcccaggagttcaaggttgcagtgagccatgagcatgccaatgcactccagcctgggcaacagaatgagaccttgtctcaaaaacaaaacaaacaaacaggtcaggtgcagtggttcatgcctgtaatctcagcactttacgaggccgagacgggtggatcacctgaggtcaggagttcaagaccaccctggccaacatggtgaaaccccatctctattaaaaatacacaaattagctacatgtggtggtgggtgcctgtaatcccaggtacttaggaggctgaggcaggagaatctcttgaacccaggaggcagaggttgcagtgagccaagattgcaccactgtactccagcctgggcaacagagcgagaatcctctcaaaacaaaacaaacaaacaaagaatatgcaaaggccctgaggcagaaaggaggctgcacatcgggctggagaggacaggcaagaggggggcacagaggagctataggacaaggatggagaatggggggaggcctggtctcactggccttgtgcggctttgtggacatgttgaggacttaggattctgaggtttttttctgttttgtttttgtttttttttgagatggagtctcgctctgtcgcacaggctggagtgcagaggcgtgatctcggctcactgcaacctctgcctcccaggttcaagcgattctcctgcctcagcctcccaggtagctgagactacaggcatgtactaccaaacccagttaatttttgtatttttagtagagatggggtttcaccatgccgctcaggctggtcttgaactcctggcctcaagcaatctgccctccttggcctcccaaagtgctgagattacaagtgtgagccacctcgcccggccaagccacggaagatttcaaataagggagtgacgtgctctgatttgcatttttcacagtcactctgattgctgggcagagagaatggagggcagggtggtgagagtgaatcaggtgacccgccaggaaaaggtgcacgtactcatcggtgccagagatgattggggctttgagatggaggcaaatggacacatttccgaactaattgagcaggcacgtctacaggatttgggggtgagggaggggagaaacccatggctgactcctgtaatttcttcaggcagggtacttgggttgggaggtctgtttggagttgtctggggcatggtgtggggtgtcggcaggatacagtggagatgagggggaagttagtgaattggtggggctggagctcagagccagaccatcacaggagatggaggcctgcgagtcttcaggatctgtcactgaccaaagtcttgctcacggatgagcctatcatctgtggaagaaagtgtggaatgagatgagaacaggcctgggtggaggccagggaatcagcagagacagccaagaaggccagaggctaggaggcaaaccccacagtgtgcccctcctccccaggagccaagaccagagatggtttcaagagagggggccaggcacaatggctcccgcctgtgatcacagcactttaggaggctgaggctaaaggatggcttgaaaccaggagtttaagaccagcctagttaacaaagtgagatcccatctctacaaaacaaaaaatgaactgggtgtagtggtgcatgcctgcagtcccagctacttgggaggctgaggcaggaggattgtttgagcccaggagattgaggctgcagtgcactgtgatcatgccactgccacagcaagactatcttaaaaaaaaaaaaaaaagatcagagaggggcacgacatcaaatcctccactttcttgagcttccagttgctctgatgatgatcaaggctgtgaaactctcctttggcaaatgcatgaggggtgactgttgtgtctccgagccaggccctgggacccaactctgggcaggtagcagctccctgtgtataccagatgtgatagtaaaaaactgacactgggccgggcgcggtggctcacgcctgtaatcccagcactttgggaggccgaggcgggtggatcacttgaggtcaggagtttgagaccagcctgactagcatggtgaaatcctgactctactaaaaatacaaaaatacaaaaattaacagggtgtggtggcggatgcctgtaatcccagctactcgggaggctgaggcaggagaatttcttgaatccgggaggcggaggttgcagtgagccgagatctggccaccgcactccagcctgggcgacaagagcgaaaaactccatctcaaaaaaaacaaaaaaacctcctgggccccagaagatggcaactgcctcttccagcctcttccacctgcctgcctgtgcactcctctgccactctggacctattccatggtgccacgtggtcaggcattgaaggaatgggtgggttttttttccatcaccctcagatgctgctgctggggttggggcgggtcttccctggctgactctgtctgcctcacccactctctccccatctctctgtcaccacaggtctccagggaccaaatttagcccatttttcctccaaggattctggacccttggccatatttgcctctagctttaggtcaacagatttctaacatggagtcaaaaaatctgtatgtttaaaaaaaaaaaattggctgggagtggtggctcacgtctgtaatcccagcactttgggaggccgaggcaggtggatcacctgaggtcaggagttcgagaccaccctggccaacatggtgaaaccccgtctctactaaaaatacaaaaattagctgggtatggtggcggacccctgtagtcccagctactcaggaggctgaggcaggacaattgcttgaacccgggaggcagaggttgcagtgagctgagatcgcgccattgcactccagcctgggtgacagagtgagactctgtctcaaaaaaaagaaaaaaaaaaaaaaggccgggcgtggtggctcacggctgtaatcccagcactttgggaggccgaggcgggcggatcacgagatcaggagatcgagaccatcctggctaacacggtgaaaccctgtctctactaaaaatacaaaaaattagctgggcatggtggcgggcgtccatagtcccagctactcgggaggctgaggcaggagaatggcatgaacccgggaggcggagcttgcagtgagccaagatcacgccactgcactctagcctgagcgacagagtgagactccgtctcacaaaaaaaaaaaaaaaaaaaaattgaggccaggcacagtggctcatgcctgtgatcccagcactttggccgaggcaggcagatcacctgccatcaggagttcgagaccagtctcgccaacatggcaaacccctgtctctactaaaaatagaaaaattagccgggcatggtgtcgggcacctgtaatcacagctactggggtggctgaggcagaagaattgcttgaacccaggaggcgaaggttgcagtgagccgagactgcaccattgcactctaacctgggctataagagcgagactctgtctcaaaaaaaaagccctttacaaatattaactcgtttaattctcagaacacccctaggaggtgggtcctgctatcctgccggttttgtagatgaggtaactgaggcacagagaggataagtcacgtggcccaggtcttggtcgcttctcagcctccatttccgagaggagaaaacaatgctccgaaaggggaagtcatcggcctgaggtcaccagccgggaaccggaggagccaggatggggcccgaggtccatctgaggccagagccagtgctgacccgccagacaggaaatcagagctggggactgaccgtggggcccactcaagtgggtggtgtggggtggtgacgggggctggggtgaaagccaggatgaggtgtcacattaggctagggttcctgctgggcctggcggggcagagacccctggttgatgcctggcaagtctctcctcatttctgctgtgctgtcccctgggtggccaaggcgccaggcccggctgtggatctgacacctcctgctgccgagctctgatcagaatctggctgcagggcagggggtgaaactgaatcccaccaggcctcccctggcctggatgtcacggcagacatcccaaccccacttcttggcactgcctgaccccagcagtggccttcttggaacctggagagcctgtgcccaccctgtggtgccgaccaggctgctgccttggccctgggctctgggctccagggtccccagggatcccaggcccaggctcttgcccctcccggctctcaggtgagctgctgggatcgggttcctgcggtttcatgtctttcattgttcttggctggggcccggcttatgaaactgtaatgaggggcccctgctcccgaagccggcccctctaaggtttccactgcctcggcggctgctgccaccacagcccggagtcggggcctgggagggcagcagtgtgggggcctgagccggagccccccggggacgagggtgctgacagtcgacagccaccaccaccaccagagcccgcagcccaggtaatccgagaggaggcggggcgcagggtgccatggccgctgtctcccaccaccaggggagggaactgccgctctccagaggtggggaggaattggggggggccctggaggtgagcagccgttcccccctggtgagcccagcaccagaccagccttcacaggtgtggccttgccaaaggtggagggagagaggagtgggcagctggctctagcccccgcccttttcctggggccttgaccctccagccctggatcccctgcctctcctttagtggggcaaatctcttctgtcctccaagaccttgctttcccatctcctctaccatcaaactgcctcttcctccctcagacctctcccttctctcagccagcctaatccttcctcctcgcccttgtcttttggccgcaaaagaccctggtggatccttctatccacctcgttctggggcgcacgcacatacatgcatgtatacatgaagttgcactcatgcaaacgtacagatcggtgtacccgcgggacctgcgtagacacgcatgcgcaagagctcgctccacctatgtgcacacatgtgcccccaataccaggcctttatccacacacatacctgctccaaggcccatatgtgtacactcacgtgtgcaggcacacaccaggtacctcagccagccctcggcttgagtcccaaggggtgcttctagcctgatgggcagctccttgagaagtgcaggatcccccgaggagatgcctggagactcccacgccaccgggaggggctgtgcagggggaggggagcccccacgtgggcgctgagctgtctcctctctccaaccctggcccaggagctcaggagcccttcaggtgctgaggtgccctactgcgacctgcctcgatgtccacctgcccctgaggacccactcagcgcctcaacctccggctgccagtctgtggtggacccaggcctcaggccagggcccaagaggtgggtagagtcccagggcccaggaagggcttcatggggtggaatgccctcacccttcccatttgcactccttccccaaggcagcacctgtctctaatggctgctggcatgggtcacgtggtcagtcctctaaacctaggcacaggtgggtggtgggcatgctccttgggcccacaggaagaactcagatcacaccaccctgtttgcacttcagtggctgagcctcccctccccagtcctggctgtctctcccaggggccctgcccaccccataacctcccaagaccgagctcagctttgccccagggtgtgtggctgctgtacactcaccttgcagtgggcatggccacagcctactcacatttcctggttccctttgcacagctttaaaagattaaacagtccctgcacccaggggcacctgctgtcacccacctacgtgggtgtgcactgctccaggctctggggttccttccaccctcaggcctgagtggcagtccccctttaaggtcatggtaccttgggaggccatggtctgagagtctagaaacctgggttccagcttcagatccatccctgatgggtcttgagcaagttactctgtctttctgtgtctcagtttccctctctgtaaaataagagggattgaattaaatcagcattgtgctgggatcattcatgtgctcctcacaggtaggcatattaaaacaaacaaacaaacaaaaaaacagcctgggtgcagtggctcatgcctgtaattccagaactttgggaggccaaggtgggcggatcacttgaggtcaggaggtcgagaccagcctgaccaacatggcgaaaccctgtctctactaactatacaaaaattagccaggcatggtggcaggtgcctgtaatcccagctgctcgggaggctgaggcaggagaaccacttgaacccgggaggcagaggttgcagtgagttgagatcgtgccattacactccagcctgggtgacacagcgaggctccgtctcaaaaaaaaaaaaaacaacaaaaaaaaaaaacaaaaaaaaacccacaaaaaaacgaaaaaaaaaacaaagacagctttgttatcaagtatgtttcagaaagtctgggataaatgaagttgaatagctttcctgcaggacttgtcagagcctttagcttgcctgcgtgcatcgtggcttttgggtaacggaagtagagaagtatgtcatttgactacagagctcttttttatggccatcacttattatcatcgtgtaggccagtctgtgggtcactctttggggatactgccagcgctaagccttcttgagcctgtgacttcttttaaagcagagccttctctgcagctccctccctcagcatctgggctagtgaacccgtcaatgcctgtggagccatgctgcctctcacatcctcgttagccaagcatgagtctgtcttcttagacttactgaacttggggtcagtagactaagactaagacttaaagttggggctggggcaatagttttggttcataacacagctctgccctttcctatctcggtgaccttggccagtctcttgacctctctgagcctcagtgtcttcctctgtgaaatgggaattattattattattattattttgagatggcatcttgctctatcacccaagctggagtgcaatgacacgatgttggctcactgcaacctcagcctcccgagtagctgggattccaggcatacaccaccacacccgactaatttttgtatttttatttatttatttttgagatagagtctcgtgctgtcacccaggctggagcgcaatggcacgatcttggctcactgcaacctccacctcctggcttcaagcgattatcttgcctcagcctcctgagtagctgggattacaggtgtgtgccaccaccatgcccatctaatttttttatttttagtagagacggggtttcaccatgttggacaggctagtctcggactactgacctcaggtgatccacccaccttgacctcccaaagtgctaggatttcaggtgtgagccactgcgcccggcctaaaatgggaattattatacttactttaaagggatgctgttgctgggcgcagtggctcacgcctgtaatcccagcactttgggagtccgagacgggcggatcacgaggtcaggagatcgagaccatcctggctaacacggtgaaaccccatctctactaaaaaatacaaaaaattagccaggcgtggtggcgggcgcctgtagtcccagctactggggaggctgaggcaggagaatggcatgaacctgggaggcagagattgcagtgagccgagatggtgccactgcactccagcctgggtgacagagcgagactctgtctcaaaataaataaataaataaataaataaataaataaataaataataaaattacaaaaaaaaaagggatgctgttttagctcaatgaggcaatccatataaaaagtctgacacagaggcagctctcaccattggctccctttcccacaccagcgtgtgggccccaggctccctgtgtgagtgagtgcatatgcctgggtggggtgggggatgctcctaactccccattactttttgggtctgtctcctctcccaggggcccatccccctcagcagggctcccagaagagggtcccacagctgcccccaggagcaggagccgggagcttgaggcagtaccctatctggagggcctgaccacttccttgtgtggcagctgcaacgaggaccccggctctgaccccacctccagccctgactccgccacccctgatgataccagcaactcgtcctctgtggtgagccaggagtgggagtttgggggacaagagtggctcacacctccatctgcagccctgggtcccacctaaacctccaggccagggctgagcctcacaccagggaatccgacgaggtcctctggaccattagctggcagctcgggccaccccggcgaacccctggagagtggggatttctgcacaggctggcccagggcagctggggtctggctgtgaaaagacagggaaaggagtttcagccgacaggagctctgggtgaatcaccagcaggctcgggctgccacatgctctcagatcccagagtgttgggtttggtgtctagcgcaagagtggcacagggccccagggccctgccctcgacacacagtgctgagtcccatggccagccctggaatagatttccaagagacagaggaaagggagcaggctgcgggggtcatttaaccacgaaaagagaagagccagcagtctttcctccagcatttgcattttgaggggctgccgcagagcagaagagacaggcttgtcccaggagaccccccaaaaggaaaatgacagggggtggtgataagactcagaataaaacaacccagcctcacacgcttcatggccagctccatgctaagggcttggtgggtgtgggctcaggggagactcaccacagcctcagaagtggagatttcagtcgccccatatggggctgaggctcagcggggggagcaacttagtggaggccacacatctgggaagtagtggggctaggatttgaacccacttttctctggcccctggggctacctcacacagtcccacatgcggaactctgggactctgggcaaagctcttggcttcaatggatgtacatgcctcctaggtccgttgaagatgagcgacttggcacttagcacctgctagagcccagcacagtgccaggcaaacagcacatgcttttaatttaattgattgattgaagactgggtgcggtggctcacgcctgtaatcccagcactttgggaggccaaggtgggcggatcacctgaagtcaggagatcgagaccagcctggccaacatggtgaaactctgtctctactaaaaatacaaaaattagcagggtgtggtggtgggcacctgtaatcccagctacttgggaggctgagacaggagaatcgcttgaacccgggaggttgcagtgagcttagattgcaccattgcactccagcctgggcaacaagagcaaaactccgtcttaaatagagaaaaaaaaaaaagttgattgattgagacagggtcttgctccattgcccagactggaatgcaatgatgtgaacatggctcactacagccttgacttcctgggctcaagtgatccccccacctcagcctcctcagtagctgggactataggcatgcacaaccatgcctagttattattattttttttaattttgtagagacagggtctcactgtgttgcccagcctggaagtgctttttactgaggccatggagcggagtctacaccacagaaggtgtggcaccactcactgtcacctcttggggacagaacttgacagtttaggaagtgctttttattttttatttaattttatttatttttgagatggagtcttgctctgtcacctgggctggagtgcagtgccacaatctcagctcactgcaacctctgtctcccaggttcaagcgattcgcctgcctcagcctctcgagtatctgggattacaggcgcccaccactatgcctggctagtttttgtatttttaatagagacagggtttcaccatgttggccaggctggtttcgaactcctgccctcaggtgatccacctgcctcagcctcacaaagtgttgggattacaggcgtgagccactgcgccctgcagggaagtgctttgtttttttttgttttgtttttctttttgttttttgagacagagtctcactctgtcacccaggctggagctcagtggcgcgatctccactcaatgcaagctccacctcccaggttcacaccattctcctgcctcagcttcccaagtagctgggactacaggtgcccgccaccacgcccagctaattttttgtattttttagtagagatggggtttcaccatgtttcccaggatggtctcgatctcctgacctcgtgatccacccacctcgtcctcccaaagtgctgggattgcaggcgtgagccacagcgcctggccagggaagtgctttttaatgccaattcccttcccttccttctgcccctctcatttggagagtatatgtcctgcagccttttttctcccgcaaacatactttctcctccccttctctggcaggactgggacactgttgagaggcaggaggaggaggcccccagctgggacgagctcgcagtgatgatcccgaggaggcctcgggaggggccgagagctgacagctcccaaagggctccgtctctcctcaccaggtcccctgtgggaggagatgctgcaggccagaaaaaggagggtgagtccttctgccaggttggttcccatggtgatggcctggggccccccagatagccatctcactggccatttgggactctgggcacggcttactttggtggcctgagtgttaataatagtaacagtttgcatgtcatgatggagcagccacaatgagttatgctacccactttaattattattattattatttgggatggagtcttgctctgttgcccaggctagagtgcagtggtgtgatctcggctcactgcaacctttgcctccccagttcaagcgattctcctgccccagcctcccaagtagctaagattacaggctcccgccaccatgcccagctaatttttgtctttttagtagacatggggtttcaccatgttagcccagctggtctcaaactcccaaccttcagtgatctgcccatcttggcctcctaaattgccgggattacaggcgtgattacaggcacgcctagcctgttattattattattattactattattattttgagataagagtctcacactgttgcccagactggagtgcagtggtgccctcttggctcactgcaacctccgcctcctgggttcaagagattctcctgcctcagcctcctaagtacctgggattacaggcacccgccaccacacgtggctaatttgtgtatttttagtagagacagggtttcaccatgttggccgggcttgtctcaaattcctggctggggattacaggagtgagccactatgcctggccttagccaaggagtttggacttctctaaatagtagggagccaccgaaggtttttgaggaggaaagtcatgtaattaaacctgtgcctcaggaagttccctagatcaaagatgcaaaggatgaattggagcagggaggggttgaaggatgagaaaccagttaagagactgttgcaggcactgtagcaataactggttcaggcatgaatcactggcggatgcaaaatccctagggtgataatttgtcagcaaacaggatagtcatggtttcaaagtattgtgtccggaattggtgggttcttggtctcactgacttcaagaatgaagcggcagaccctcgcgatattacagttcttaaaggcggcgtgtctggagtttgttccttctgatgttcggatgtgtttggagtttcttccttctggtgggttcgcggtctcgctggctcaggagtgaagctgcagacctttgtggtgagtgttacggctcttaaggagacgcgtccgcagttgttctttcctccctgtgggttcatggtctggatggcttcaggagtgaagctgcagaccttcgtggtgagcgttacagctcataaaggcagtgtggacccaaagagtgagcagcagcaagatttattgcaaagagcgaaagaacaaagcttccacagcatggaagaggacccgagcgggttgccagagctggctggggcagcctgcttttattctcttgtctggccccacccacatcctgctgattggtccattttacagagagccgagtggtctgttttgacagggcgctgattggtgcatttacaatccctgagcttgacacaaaggttctccacatccccactagattagctagatacagtgtccacacaaaggttctccaagtccccaacagagtagctagatacagagtgtggattggtgcattcacaaaccctgagctagacacagggtgctgattggtgtgtttacaaaccttgagctagagacagagtgctgattggtgtatttacaatcccttagctagacataaaggttctccaagttcccactacactcaggagcccagctggcttcacccagtggatctcgttctggggctgcaggtggagctgcctgccagtcccatgccatgcgcccacactcctcagcccttgggtggttgatgggactgggcgctgtggagcaggggcggcgctcatcggggaggctcgggctgcacaggagcccacggaggcggggggaagctcaggcatggcgggctgcaggtcccgagccctgcccggtgggaaggcagctaaggcccggcgagaaatccagcgcagcgctggtgggcgggcactgctgggggacccagcacaccctccccagccgctggcccaggtgctaagcccctcattgcccggggccggcagggccagccggccgctccgagtgcggggcccaccaagcccacgcccacccggaactccagctggcccacaagcgccgcgcgcagcctcggttcccgctcgcgcctctccctccacacctccgtgcaagctgagggagccagctccggcctcggccagcccaggaaggggctcccacagtgcagcggtggcctgaagggctcctcaagtgccgccaaagtgggagcccaggcagaggaggcgccgagagtgagcgagggctgtgagggccgccagcatgctgtcacctctcagtatcacccctcagattctgcatcgattactgagagaaaggcacccttaggctggggagagcgggaagataccactttcaccaagaggctgctcagcatccccagagtggggcaaaccaacataatatgccccctgatatgatgcatggggtcaggggaggggatgctggggtgggcacagaatcccttcccttctaaatcgtcctgctgaaaatgcattgcctacacctaaccccagtgaaacatcagacaaacccgaattgaaagacattctgcaaaatgactgggctcctcataggacaaaaagcggctaggggactcttcttgattaaaagagactaacaggatgaggacgtggaatgccatgtgtgagcccattgggatctgggacaggaggacacagagctgtgacaggcattactgggacaactggggcttgtttttttttttttttttttttgagatggagtcttgctctgttccccaggctggagtgcagtggcgcgatctcagctcattgcaacctccacctcctgggttcaagcgattctcctgcctcagtctcctgagtagctgggactataggtgcctgccaccacgcccagctgactttttgtatttctagtagagacagggtttcaccatgttgagcctgatgggatccgggacacgcctatagtcccagttactcgggatgctgaggcaggaggatcgcttgaacttgggaggtggaggttgccgtgagctgagatcgccccactgcactcccgcctgggcaacagaataagactccatctcaaataaataaataaataaataaataaataaataagggccatggttgtggggtgaggaggggacagagaaggagagaggtttaggaggcagacttgatggtactttggacaggaggatacacagtcacagctcctggcctgggtgtctgggtagatggtgtgccctttgctgagagcaggtggctggggagcggatgggcccagcgctggctgtgctgtgtgggatttgcgagccctgaggaagaggttttgaggcttcagatgctcagggaagcaggggatggagatgtggcatcttcaactgaggagcaatgttcactcaggcactcagcagacgtttacttactgcccacaagtcaatcatggctgaatagatgaggcagcaatgagaacagcagcagcattacagcagtgacctgtttttttgatgttccaggccttgtgctaaataaatgtcttgcacagaatcactctgggctccccgatccctcactcctggtctgcctccttcctcacgggccactccacctcgctctcctttgctgaggccgcctcctctgcttcacttttaaatatctgatgccccacatcccagtcctgggccccttctgtcttctccctgcacacttagctgcttggctttcggtactgtctgggaaaaaccatgactccggagtccacatctctggccttgatttctcccctgaacctgccaatttatacaacccagccctctactgcgttaatcacacctcaggccccacactgcactcactgtttcactcatccccccccgcccttttttttttttttttttttttttttgagacagagtttcactcttgttgcccaggctggagtacaatggcgcagtctcggctcactgcaacctccacctcccaggttgaagccattctcctgcctcaggctcccaagtagctgggattacaggcatgcaccaccacgcccggctaattttgtatttttagtagagacggggtttctccatgttggtcaggctggtctcgaactcccgacctcaggtgatccgctgatccgcctgcctcggcttcccaaagtgctgggattacaggcgtgagtgaccgtgcccggcccactgctacaatactattaactaagctacagacgtgatgggattcaccagtttttctactaatatcctttttctgttccaggatccattccaggatcccacattgcctttagtccctctcctcatctcctccgtctcctccaatctgtgacaggtttcccatctcttccagtttcccctgaaggctgggggcacagcgatctgctcacctttgactttaaaaaaagtctccctggatgaacaatgacattggccccagagtgcccaggcttgggggctactgcaaccatccaggagagaaatagtggtggcttggagtaggaagtgggtgtagatgagagaaacaggtgaatatggaatgtatttattttatttttcgtagagatgggggctcactatgttgcccaggctggtctccaactcctgggctcaagcaatcctcctgcctcagcctcccgaaatgttggaattacaggtgtgagccactaccaggcatgaaacgtattttagaatgccatgggacatcagccaccagcaattttttttgttttttgttttctgagacagagtctcgctctgtcacccaggctggagtgcagtggccagatctcagctcactgcaacctccacctcccgggttcaagcaattctccagcctctgcctcccgagtagctgggattacaggcatgcactactgcatccggctaattttttttttttttttttgtatttttagtagagatggggtttcaccgtgttagcagggctggtatcgatctcctgaccttgtgatccgcccgcctcggcctcccaaagtgctgggattacaggcatcagccactgctcccggctgcatccagctaatttttgtatttttagtagagactggtttcaccatgttggccaggctggtctcgaactcctgacctcagatgatccacccgccttggcctcccaaagtgttagcattacaggcgtgagccaccgtgcctggcaaccttgcaaattttgaattccctgctaggtgctgggaactcagactttcaccaacaccagcccagagaggctggacgaggcagtggctgcaaagggagaggacaggggatcttaagaaggcgtgaagggaggggatctgcatgaaggcaactgtggctacttttttgtttcgttttttgttttaagacaatgtcttgctctgttgcccatgctggagggcaatggcacattcttggctcactgcaacctccacctcctgggctcaggcactcctccggcctcagcctcctaggtagctgggactacaggcacgtaccaccaggccctgctaagttttaaaaaacttgtagtagagacagggtctcgccatgttgcctaggctggtctggaactcctgagctcgagtgatcctcccaccttggcctctcaaagtgctgggattacaggtgtaagccaccacacccatagttgtggctcctttaagatgaggccatgataccctttactcttcacctaaagcagtagccaagggacatgtacataggggtgctcaacacctgcttggtgaccgagggattgagcggggtggagggtgacacaccaaggtcatggcaactctgtcatgaggctaggagttgcaaagagggtcactactgaggacagttacattaatcctttaggccagtgcttctgaaactataaggtgtacaaatcaccagacagttttgttaaatgcagatccagaagcagtgcatctgggctgggacctgagattctgcatttctggcaaactcccagctaccagtttataaaaggttgtccatccctgcacctttcctatcctcatggcagccctaggagaagcctcagggtaggaacatttggatacaaaaaaacaggggctttctagagctgtcgcacaggaaacaggctcattagaacctgtctctactaaaaacacaaaaatgagctgggcatagtggtgcatgcctgtaatcccaactacttgggaggctgaggcaggagaatcatttgaacccaggaggcttaggttgcggtgagccgagatcgcgtcattgcactctagcctgggtgacagaacgagactctgtctcaaaaaaaaaaaaaaaaaggtcgggcatggtggctcacgcctgtaatcccagcactttgggaggccgaggtgagcggatcacctgaggtcaggagttcgagaccagcctggccaacatggtgaaaccccgtctctactaaaaatacaaaaattagctgggcatggtggcgcatgcctgtaatcccagctactcgggaggctgaggcaggagaatggcttgaacctgggaggcggaggttgccatgagccgagatcacgccactgcactccagcctgggcgacagagcgagactctgactcaaaaacaaaacaaaacaagaaatggggggaattccttggattctgattgaaggaaatagaactgggaagggaagactgtcaggtggctgctgttgggcccacctctccctccctggggtcacacaggccattgtcaacacttctctccacaaatttgcttcttctctgtcttgtccgtggatccccagaccctgtggccttccagttcttgaacccatctcttgagtgagtcagggtctcaatttcaaattcttgacctcagcttgagagaggcatccaagcccttgtctaatcagccttggtcagagaggtggagtcacttggtacagacagtgagacctgtaggaggagggtgtggggtttgccctaatcactggtcctaagggacaaagaaaggtagaatatgagagctgcctggacctctccccttaccttgagcccctctcttctctctccagacaccggcggtgggggccggagcgcaggacagcactgggcaaggctccggggagaaagcgggttgtccctggagcggcaccggtcaacactgacccaggcttcctccatgacaccacacagtggacctcgaagcaccacgtctcaggcttctcctgcccaaagggacactgctcaggctgcctctacacgtgaaatccccagagcctcctctccccatcgaatcacccaaagggacacctccagggcctcatccacccaacaggaaatctccagggcctcatccacccaacaggaaacctccagggcctcatccacccaagaggacacccctagggcctcatccacccaagaggacacccccagggcctcatctacacagtggaacacccccagagcttcctctccctcacgaagcacccaactggataaccccagaacctcttctacccagcaggacaacccccaaacttcttttcctacttgtactccccagcgggaaaaccccaggacaccctgtgtccagcaggacgatcccagagcctcctctcccaacagaaccactcaacgagagaattccagaacatcctgtgcccagcgggacaatcccaaagcctccagaacctcctctcccaatagagccacacgagacaaccccagaacatcctgcgcccagcgggacaatcccagagcctcctctcccagtagagctacacgagacaaccccacaacatcctgtgcccagcgggacaatcccagagcctccagaacctcctctcccaatagagccacacgagacaaccccagaacatcctgtgcccagcgggacaatcccagagcctcctctcccagtagagctacacgagacaaccccacaacatcctgtgcccagcgggacaatcccagagcctccagaacctcctctcccaatagagccacacgagacaaccccagaacatcctgcgcccagcgggacaatcccagagcctcctctcccaatagagctgcacgagacaaccccacaacatcctgtgcccagcgggacaatcccagagcctccagaacctcctctcccaatagagccacacgagacaaccccagaacatcctgtgcccagcgggacaatcccagagcctcctctcccaatagagctacacgagacaaccccacaacatcctgtgcccagcgggacaatcccagagcctccagaacctcctctcccaatagagccacacgagataaccccagaacatcctgtgcccagcgggacaatcccagagcctcctctcccaacagaaccacccaacaagacagccccagaacatcctgtgcccgacgggacgatcccagagcctcctctcctaacagaaccatccaacaagagaaccccagaacatcctgtgccctacgggacaatcccagagcctcctctcccagcagaaccatccaacaagagaaccccagaacatcctgtgcccaacgggacgatcccagagcctcctctcctaacagaaccacccaacaagagaaccccagaacatcctgtgcccgacgggacaatcccagagcctcctctcgcaacagaaccatccagcgagacaaccccagaacatcctgtgcccagcgggacaatcccagagcctcctctcctaacagaaccatccaacaagagaacctcagaacatcctgtacccgacaggacaatcccaggacctcctctcccaatagagccacacgagacaaccccagaacatcctgtgcccagcgggacaatctcagagcctcctctcccatcagagccacccaacaggacaaccccagaacttgtattcaacagaacatccccagatcatcttctacccaacaagacaaccctaaaacctcttgtaccaaacgagataacctcagacccacttgtacacagcgggaccgcacacagtccttttcctttcaacgagacaaccctggaacctcctcatctcaatgctgcacccaaaaggagaatctgagaccatcatctccccaccgctccactcaatggaacaatcccaggaattcatctccccatcgtactaacaaagacatcccctgggcctcgtttcccctccggccaactcagagtgatggtccccgaacctcttccccatctcgctccaagcaaagcgaggttccctgggcatccatcgccctccggccaacccaaggtgacaggcctcagacatcctctcccagcaggccagcccagcatgacccaccccagtcctcctttggccccacccagtacaacttgccatcccgggccacctcttcctcccataacccaggccaccagagcacctcccgaacttcctcacctgtgtaccccgctgcctatggggctcccctgacctctcctgagccctcccagcctccatgtgctgtgtgcattgggcaccgggatgcccctcgagcctcttcgccccctcgctatttgcagcacgaccccttccccttcttcccagagccccgcgcccctgagagtgaaccgccccaccacgagcctccctatataccacctgctgtgtgcattggacaccgagatgccccccgggcgtcctcgcccccccgccacacccaatttgaccccttccccttcctcccagacacatcagatgccgagcatcagtgtcagtccccccaacacgagccccttcagctccctgcacctgtgtgtattgggtaccgagatgcaccccgggcctcctccccaccacgccaggccccagagccttccctcttattccaggacctccccagggccagcacagagagccttgtcccttccatggactctctgcacgagtgcccccacatccccacccctgtgtgcattgggcaccgggatgcaccctccttctcatccccaccacgccaggctcctgagccatccctcttcttccaggatccccctggaactagtatggagagcctggccccctccactgactctctgcatggctccccagtgctgatcccccaagtgtgcatcgggcaccgggatgcaccccgagcctcctccccaccccgccacccacccagtgacctagcgttcctggcaccctcaccttcaccgggcagctctgggggctcccggggctcagcgcctcccggggagaccaggcacaacttggagcgggaggagtacactgtgctggccgacctgcccccacccaggaggctggcccagagacagccagggccccaggcgcagtgcagcagcgggggccgcacccacagccctggccgtgcagaggtggagcgcctcttcgggcaagagcgcaggtgagcccgggggtggggtcagccaggtgggctggggaggaggctcggcagcaggacaggtgaagggttagggtgccaaaagaaagtgttcaaatccccctggcttgccatttaccggctgtgtgaccttgggcaaatcgctccatttctctgtttctgcatattgggagttttctgttttgtgtgtgtgtgtggttaagtgatgtcatgcacagcccagtggttaacagcaaagactgcagtcaggagggctgagtccaaatcctgggtcaaagccacatgtcaactcgtatgacctgatatagtgagttaacctacctgagcctcagtttcctcatctgtaagggaggggaacatgagcacattcattcaaataagggtgaactgtctttttattttttattttttgtttttttttttgaggtggagttttgctcttgttgcccaggccggagcgcaatggtgcaatctcggctcactgcaacctccacctcctgggttcaagcgattctcctgcctcagcctcccgagtagctgggattacaggcacgtgccaccacacccggctaatttttttgtatttttactagagacggggtttcgccatattggccaggctggtctcgaactcctgacctcaagtgatccacccgcctcggcctcgcaaagtgctaggattacaggagtgagccaccgtgcccggccaaaatgagagtgaactctcaaaccctttgatccagactcatgggttttttttttttttcttccgtgcatgagggagaagaagaaagtacccatgattttttcctgccttggcaaagaaaactcatgggtccctatgcatttcagaaaacagttatgtcaatttaaaatgtatggccagggccgggcacggtggctcatgcctgtaatcccagcacttggggaggccgaggcgggcggatcacaaggtcaggagatcgacagcagcctggctaacacggtgaaaccccatctctactaaaaatacaaaaaattagctgggcatggtggcgggcgcctgtagtcccagcaactcgggaggctgaggcaggagaattgcttgaacctgggaggcggagcttgcagtgagccgagatcgtaccactgcactccaacctgggtgacagagtgagactccatctaaaaataaaaataaaataaaaatgtatggccagagctacctattttaagaaagaaagctcacagaattatggatttttagcagtcaaacatcctgggacacctgaagtccaggtgtcttttgagtctccttggtcagcagcactggccccctggaaggggagcatttcctcctgatcaggctgaggtttctctccccagaagttccagccctcgagttttcaagaatcagagctagaattccattagttagggtcaagagaacaacagcaacaaaaagcagtctggaagtctcaaaactttccatgtatataattcaacgaatttttagtttatttaccaagttgtccaaccattgccacaatctaactttagaacattttcatcaccctaaagggtatggaatattttgtatctaaaattcctctttgctgctccttgggaaagttttctcctggatttgaatctgcatgagaaaccttatcagtcttggctgggtgcagtggctccctcctgtaatcccagcactggagcttgcagtgagccaagatcatgccactacactccagcctgggtgacagagtgagactccgtctcaaaaaaaaaaaaaaaaaaaaaaattagccgggcatagtggcacacgcctgtagtcccagctactcaggaggctgaggcagcagtattgcctgaatttgggaggtggagtttgcagtgagctgagattgcgtcattgcactccagcctgggcaacaagagtgaaactccatctcaaaaaaagaaaaaaaagaaactttatctcttgttcttcaaatttccttttccagtaagcttgatcatttaatatccagatgacaaccgtgtggtctccagcattagtataattctttctttggccttaaaaacaaaaacccagagcagttttaggtttacagcaaaattgagcagaaagtgcagtgttccatgcacagcctctcccactaccaatatcctgtactagataggtatgcttgtttccagctcctggcctcaagggatcctcctttcttggcctctcaaagtgctggtgagccactgtactgggcagtagggtgatacatttgttacaatccatgaacctacactatgaaatcacccaaagtttagggttcactcttggtgatgtacagcctataggcttgaatgaatgtatgacaagtatccaccattgtaacatcatggagtagtttcaccctgaaagtcttcagtgtctttaacttttttttttgtttggagatggagtctcgctctgtcacccaggctggagtgcagtagtgcaatcttggctcactgcaacctctgccttctgggttcaagcagttctcctgcctcagcctcccgaggagctgggactacaggagcatgccgccacatccggctaatttttttgtatttttagtagcgacagggtttcaccctgttgcccaggctagtcttgaactcctgagctcaggcaatctacccacctcggcctcccaaagtgctgggattataggcgtgagccaccgtgcctggtctgaccttttttttttttgaaacagggtcttgctttgtcacccagcagtagtgcagtggcgtgatcatggctcactgcggcctcaaactgccaggctcaagcgattctctcacctcagcctcctcagtagctgggactacaggcgtgtaccactatacccagctaatttttctactttttgtagagatggagtctcactttgttgcccaggttggtctcaaactcctggcctcaagcaatgctcccaccttggcctcccaaagtgtctttgacctttttatgattactatttcttgtctaatgtcaattttcctaactttgtcttaactaataactcagcagggacattaaggtctttaagccaaagttaattaattttctttccttttttccaggataatttcagagagataaggtgtttatattaataatagaaatgagaaatatgtttacacttttattaaccatttgtttttacacgatcactcctatacatttaattctactctctttgaaatagcttatttaccttttagggaagttttcataattttactgaataattaaaatttttcctcttatctggcaccttttccaagtagaaaaccattcatcctctgaatatggaaaattttaaaactgtgcagtgtgtgtgtaagggacagactggagcttatgagcgggtggctgtaggagtgtgcttttattttctcctatttcctcatcgatatgtatttattgagcatctactctgtccaagcattgtcccgagtctggaaaatttttcttaaagggttgtcacatcaaagcattgggagttttggcttgatcttaatttttttttccttagatgcctttggcatctcttagagtcacgtagcatcctgtggtcatttgaattcaaaacctagccttcactggatttgctagacttgatggctttgctcctttaattctctctggaggtcgaagaacccatctaagcttccgaaggaaacgtttcctttgtcatgcttggtgcggccacatcaaccctcgggaacaggtggccccgaggagacgctgttgcttcagcatcggacaagccaggtctctgttggggtttcagaatcttcttgagtccctcactcttttctctcagttctacatgggggaaaaaaggaaggcgagttctcaggaggaatgctcatcaagcaagctggagttcgtatggaaaatgcatccatccggaagagaacacacaagtgccttgcttccctgcaccgggtgtttccactattgtcctcctggtcctccccattagggaggaacagcccactgggtcacgtctgggctcttgcttcatcgaagctcctataccccagttcgggggaaaattcactctaaggccttcagctctcacagagtaaggaaacgcactcacctccaattagattacaaattggctgggtgcagtggctcatgcttgtaatgccaagactttgggaggtcaaggcaggtggattacctgaggtcaggagttcaaaatgagaccagcctggccaacatggtgaaaccccgtctctactaaaaatataaaaattagctgggcatggtggtggacacctgtaatcccagctgctcagcaggctgaggcaggaaaatcacttaaaaccagaaggcggaggttgcagtgagctgagattgcaccactgcactccagcctgggtgacagagcgagactccatctcaaaaaaaaaaaaaaaaaaaaagttacaaacagcctgcccagggagccctcaagctcagaaacacttcctccagggaactttggttcctctccgaaccagctgccaataactgctaacaactaacattattgtgctttatggctctgattctaatgacattggcaaaagacatgaaacaacaaaaaactccaaccccatactttttttttgagacaggatcttgctctttcacccaggctggaatgcagtggcatgatcatggctcactgcagcctcaacctcccaggctgaagcgatcctcccacctcagcttcccaagtagctgggactacagccacgtaccaccatgctcggctcattaaaaaaatttttttttcctagaacaaggtctcattctgttgccagggctgtctcaaactcctcgactcaagtgatcctctgacctcagcctccccaagtgctggaattacaggtgtaaagacactgtacctggcctcccaaccccatatatatatatatatattttttgagacagggtctcactatgtcacccaggctggagtgcagtggcgcgatctcagctcactgcaacctccacctcctggggtcaagcgatcctcctgcctcagcctcctgagtagctgggattacaggcacgtgccaccacgcctggctaagttttgtatttttagtagagattgggtttcactatgttgaccaggctggtctcgaactcctgacctcaagtgatccacccacctcagcctcccaaagtgctgtgattagaggcatgagccaccacacctgggctaatttttgtatttttagagactaggtttcactatgttgtctaggctggtcttgaactcctgagctcaagccatccgcctgcctcagcctcccaaagttctgggattacaggcgtgacccattgcgccctgcccaatcccatacttttgaaggtgtcgttccagcatggctcctcaggcacaggcccaccacagacagcagggcctatggaggcctgagcagagtttcctcatacttccctttttgctgcctcactctgggtccaccacagggtggcctttttcaggcttctcttcctggttcagttcatcgaccaaagacatggctccatttgctaactgagacccaaccaaaataaacattcatggagtggttgggccttttgttgtgaccccttaggtagaggaagggagagatatgcccaggttctgtttggtgtttctacctgtcaatagagataccacgttaatcattaacagccatgcctcccagttagtaagcaagacaactaactggaactagactttttacacaagttagagatgatcttcatcggatgcgtcaacaatgcctgaagcccagtgtcttagaaacaacacttgcccagggtcaggcgtggtggctcatgcctgtaatcccagctacttgggagattaaggcagagaatcacttgaacccgggagatggaagttgcagtgagccgagatcgcgccactgcactccagcctgggtgacagagcgagactccatctcaaaaaaaaaaaaaaaaaaaagacacttgcttggacagtttatgttggcctctctgaagttgtcagggagaatgtttctttcttctgatcttgctcagagctcttttgccaacagctaggatggcctggagttttcaaggctaagcgctgggattctgttggttaacagtgatgggagggaaaaaggaaaagaaatccaaaatttacaatatggacaggaaaaggcagaaagaatggaacacgggggcacacagcagtctggctctgtcgtcccacctcgtgggctgcgatcatgatacaagtgcttggcccctggaacataagaagcactcaataaatgctttgtcataatgattatgtgtgcccagtgcctggtacacagtaggtgctcaataaatcttaattcccgcaaagaccagtctaacctttgtctgggggtggctcttgggctgctggtggggtggtggttagtcataggaagtactggatgagacaggagagggccatggccagggccagatccccctccccacccaaccgcctctactccccacttttctcgtcatgttcgcaagagcctcatgaggcagaatagagcagtgttaaccatccccatttttcagaaggggaaactaaggccctgagagtcatcctcacttagggcccttcaacgagcttgcagtgggtccctggctgtcccacatctcctcctgttggaggtgggagcagaggggctggggtgctgggagtgggacagtccctcagaggagtggctgcatttgctcataggaagtccgaggcagcgggggccttccaggcccaggacgagggacggtcacagcagcccagccaaggccagagccaacttctccgaagacagtccagccctgcccccagcaggcaggtgagcactgccagctgtctggggccccgcaccccaaggggcggccactgcctcttccctcccgctagaagccaggcagggggcttggacaggaaggtcctctatgaaagggtcggagtccaatcatggggatccagctctcccctctccccaacggccagcagctcttggcaaaatgcacaagaccccacattaatcctttgaagatagcccctctcccacgctatccccttcctttactaagcactgctgtcttttttttttttttttttttttgagatggagtcttgcactgtctcccaggctggagtgcagtgggacaatattggctcactgcaacctctgcctcccaggttcaagtgattcttctacctcagcctcccaaatagctgggattacaggcgtgtgccaccacacccaactaattttcgtacttttagtagagacagggtttcaccatgttggccaggctggtcactcctgacgtcaagtgatccgcccaccttggcctcccaaggtgctgggattacaggcgtgaaccacggcacctggccaatactgctgtcttgagcagatttcagggaaagccttgaagcaagaatctggctctaagggccctctctttcagggtaatttgtatctttaaccaaacccagagggctaggcccgcctcagtggaatggggtattggtggtggaggttctggcacctgatagcccaagttggaatcagtatctttgagaggggtgagaagccaagaacgggggcaggtctttgcagatctttttctggaactgaggaaagcgggtgaaagggaggagctgaccccggaggggtggggcagagaccctgtgtactttttggcctgctttgattcaggctgctgtgtggacacagccttgactctctgggggcctaagaaaggcagagctggcagccaggtccccagagagagagcctcacctaccccctcacctcatccccaggtgaccatgctccctgccaaacaggcagaactgacccggcggagccaagcagagccccctcatccttggagtcctgagaagagacctgagggagatcggcagctccaggggtccccgctgccccccaggacatcagccaggacccctgagagggagctgcggacacagagacctctggagagtggccaagcaggcccaagacagcctctgggggtgtggcagagtcaggaggaaccgccagggtcccagggccctcatagacacctagaaaggagctggagcagccaggagggaggcctgggccctgggggctggtggggatgtggagagcccagcctgggggcagccaaagccccggagggagcatgggggggcacttccagggagtacaaggagagctgggggcagccagaggcctgggaggagaagcccactcatgagctccccagagaactaggaaagagaagcccactcacgagcccccctgagaactggggaggccccgcagagtcctcacaatcctggcactctgggacacccactgctgtgggctggggggcagagggagcgtgtccatacccgcgtggctctgagaggcgacccgagcttgactggagggatctgcttggccttctccgggcaccaggagagggggtctgggcccgtgtccccagcctggactgggagggcctcttggagctcctgcaggccaggctgccccgcaaggacccagctggacacagggatgacctggccagggctttagggccagagctgggtcccccaggcacaaacgatgtccctgagcaggagtcacacagccagccagaaggctgggccgaggccaccccagtcaatggacacagccccgcactgcagtcccagagcccggtccagctgcccagccctgcctgcacctccacccagtggccaaagatcaaagtgacaagaggaccagcgaccgcaactctggcaggcctggagcagacgggccccctggggagcaggagcactgcgaagggccccagcttgccagagctgcaggtaaggaggtttccaccctcccaagggtagccagaaagtcagccccactcagccaagtctccttggaaaagcctccccttggagtagcctaagctcctgcatccccctccaggctcagacctcagcctccctgctgaccacaacccatcccgatcaccaaactggcccaacaatgatgatgagcaacacagttttaagcgtttatgggccaagccctgatctgaatgtttgacgtgtgcttttcccatttagtctccttagcaaccaggtgagaaatacactatttacagataaggaaactgatgcgcagggtgaagccacttgctggtggggcatgggcaaaacccaggtctgctcagtgcagaccacactgaggcctcaagcaagatgctctggccagggcctattcccctcctggctccaccatacctggtttatgttgtgtctggtggcacacacctgaccccacctgggactgtagccagtgtgggcatgccccttcccctggtggtactcaggtacctgagtccaggacagcctcgcttaccctctctggcccctacagctcctctcagacacagagaagagggtgcatcaatgctcactgggttcagctagctgccaagacaggctgcttaaatgagggtcgtgtgcaaagtgggcccagcgccgggcacacagtaggtgctcgcccttcccctgcttcactggtgctttggtgctgccttgaagcccagaacattcttcatctgaagatggtgggcagggagggtcttggaggccagaatcctgcaccctggcaatagctcattgggaggacggcatgtggttttgaacaccagcctctctctctctctgtaagatggaccaaccacttctctgacgggcagcgctggggtgccgtgggggttcctgcttgtttctccaaagcctcctcatctcctagatgcaaagtccaacgccacctgccccaggatgagcagggcttccaggcatcagggtgcaccccgtgctgggcccagggccttgccatatgtgcctcaagtggataggaggcagctgccacttgacagatggggaaactgaggctcagactccttaggcatttgctgggggtcacacatgcataggtcgtgagaaatgagatcaaagcatccactccaaagtttgtgcttttatttttatttatttatttacttattgagacggagtttcgctcttgttgcccagactggagtgcaattgcacaatctcagctcactgcaacctccgccccccaggttcaagctattctcctgcctcagcctcccgagtagctgggattacaggcatgtgccaccatgcccggctaattttgtgtttttagtagagatggggtttctccatgttggtcaggctggtcttggactcctgacttcaggtgatgcatccaccttggcctcccaaagtgccgggattacaggtgcgagccaccatgcccggcctaagtctgtgcttttagccaccacgtcacaaagctcctgagcccatgggaggactggagaaccctctcccctgtatttccctgtggctttgatgagttgaccctccaatcaactcaatgcgtggacatcagagaagcagggataagtcagctcgtcctgccctcagattgctgtcaggcttgttaggaaggcacacagacagctcaaggaggacacggtgctgtgtcccggggcatgctgggtgccacaggccggccaggtcaagaaggaagttagaaagattcttcagtttcatggtgaagctcagggttctcaggaggctaggagatggtggctgggaagggatgggagcaccatgtactgaaaggaatttcacagatgacaaaacgagtaaccaccaggtcctgctggggctccagctgctcctctctatgaaaatccttggcttggcacagctgggtgcagtggctcacatctgtaatcccagcactttgggaggctgaggcaggcaaatcacgagctcaggagatcgacaccagcctggctaacacggtggaaccccgtctctactaaaaatacaaaaaattagccgggcgtggtggcgggtgcctgtagtcccagctacttgggaggctaagacaggagaatggtgtgaacccgggaggtggaagttgcagtgagccgagatcacgccactgcactccagcctgggtgacagagcgagactccatctcaaaaaaaaaaaaaaaaaaaatccttggcatggcactcaaggccggcttcccttccttccactccggatttgcctcattggtgctgagctggctgcagggcctgtgagcacatatccctgcctttgcacatgctcttccctgttcagccaccaaacgcctgttcattgtcgaagtcttaggtcaggctccctgtcctgagaagccttccctgaacagtcactcctagtaatggtccccttctgggcttggcagttttgcttccatttgtccatgcaacatccatctaatagggttgtcatttccccataagctccacacaggcaggatctctacctgctttatctctgtaactctagctctggcccagggcctgacataaaggaggggacagctcagtggatgcatgcaagatggaggacacaggggtcagtgggtgaacaatgaatgaatggagggtgaatgtgtgaatggatgatggatcaatgatgcatgttgaatgaataatagacatcttttggatggatgacagatgggtgatgatggatggatagctgggtgatgaatatatggtggtggtggatatatgatggatgttgcttaggtgatggatggatgaactttgggtggaatatgaatggatagatgtggcatgggtggatgaatgtcagatgatagatgttggagatatgggtagatggatgatggatggagagagggatatgtaggtattgggtaaatggatatgtgatggatcaatggagggtagatacatgaatgggtgatagacaatggatgatgggtacatgagagggtgagtcatgtgatagacactggatggttggatggatacatggatctactgatgctggacgttagatgggtgttgcatggacagatgatagaatggatggatgaggtggacagatgcatgcatcctggagaataagttgggctaagctgtgttctttttttaatctccagttccaaccagaggagcctgaggagtcagaaccaagcagaggccaagaccccctgactgaccagaagcaggcagactcggtagctgggtcatgggtgtgggtacatacggtggggaagggagggggaagcaggttggagatgggcttcattcctcagaagagccctagaatcaaccagaccaaagttggcattgccatggggtcatctatgtgcatggtggggccttaagaagaggggctctgcaggagccaccttctggcttggggacctgggtaggtgggcgatcctggggtcagaaccctaggccatgcttctcatttgctgggactgaaaaggtcaatgtctttccctgcgcaaatgatggtttggccccagtggtctctgtgggaagagatccttccggtttgaaagggccaggccaggctgaaagagcagggcttccacgagcaggagccagagagctgaggatgtacccagtcagccaggcctggagggtctccagggtcctggaggcgggagagatatgtgcgggggtgggacccacggatgctgctctgaggcctggctgcagctggtgagcacaactctgcccgcccctccccgtgacctaccaaacagactgttctcgtcaccctcagcctccagagaggtgagatcagagttgagggccgtggggcagtgggaggtgggggaggaggagacagactgtttggggctgtgttttccggtcctgctcttcctcccgttgcctcctgaagccaggggtggcagggagcgtccattgggcagcatagcgccccccaagtagggccctgccgtgagtcaaagctgggggaattctgcccaaaccctcactgtgcagatgaggaaatggaggcaggggagtcgtcccaggttatacagtcagtggctagctggactgggactagaacccagggcccaggaaccacccagcgctctctctgcacctccacctggcacccatgctgcccccgtccctgccccgatttcttgcgtggcttcgaacggcagtgctgtaacttcgagcagtccagtcttcccatctgtggaatgggcggggacaggggacactggtcgctaaaggcgctgccagccctcccagggactctgacaactttgctcttcctctttctgggttatttcttcatatcctggagccagagtagtgaacgaggcggaaacagcaatgccggggtgcccctctagtctccatgaaacgggcccggcccatcaacgtggaaaatatctcaacctacccccacccctaggcagccttgactggtcagaactgataaccacctcattcatgcattctttcacacacacttagtgagcaccttctgtatacccaggtgtgggtcacaggtgagtcggagcgccatcaaagagttcagtctagtgagatggttgcatgcctgtggtcaggactgtgatggggaatgtggtagcagggtcgggggcacccctacccccaaagccctcctggacctgtgctttgatgcttcaagttccacttccaaagagtctgcagattccagagcgaggaccctgggctctctcctaccttcccagtaacccatgtgtggctttggacaagtgcctctgcttcacaggggccttggtttccccaacgaggatgactccaaagagggagcatttgggggctctgctaggaatgtgtgtagaagtccacaactcattccctttgcttaagctggggtcacaaacctaacgccctgaaggccaggcaggtaacaatggtgagaaggtgggggggcaccgagggcacttgtgtgactcctcggttccagatagctgttgccatggggaagacgggcccagagtttccacatctttcgatatttcaagaaacactggagatatgtatttatatgtgaaatctctaacctaatgtgaaatactctgaaaacactatgtgggcagaaacatacctgtggtctgcaccccctccagctggcgcccgtggtttgactttagggtgatgacgtgcacaccttcaaaggtgctgagccctgggagccttgtcagtccaacacgatgtagtgtgaacaagttaaccagctcgtctcggcagttctgggaggagagaaagatgggaaccctggggctccatggtggggggcaccacagaatgggcaggggaggctgtagccaggggtgcccccatcctgccaaagggacctggggccaacactggaccctgtttgacaggcagacaagaggccagcagagggcaaggctgggagcccgctcaagggccgactggtgacctcatggcggatgcccggggaccggcccacgctgttcaatccgttcctgctgtctctgggggtcctcaggtggcgaagggtaggctggctccagtggggactggaggggtgagggtggatagagacggggatgggagggaggagggggctgttaagcaaaggagagagagtgggggctgaggaggaggcacctagggccgtcgcatgacaggagaggtgggagcagagctcttaagctcatcctggtctcagcaagcgagtgggtttcccacttccggggcaggcttgggggctgctttcagcttttggagtgaggggtgatggaataatctacacagctgaaagcttccaatcagcagcctctcgccagccctgggccaacggggagccaggtatgggggaagggaaggcgagcttataagtggctctgggattgcaaagtgtgtctcagacctgggcctgagccagtttcacaaacatctggcgttacgtaacccatcccctgcccagagaggcctggaaacactcaagcctctggctgggttttccacaagggcaggcagctgagacccgctccctcccacccgcttcacagcaggacagaaggggcctggccatctccagcagccacaggctggctcatggggtctcttctctctttgagaggctgactctcttactcaccgctgttggctctgagtccagcactaggctgggcacctcagagacagtgtgcccattttacagatgaagggactgaggcccagggaggtgagctgacttgcctgaggtcgcacagcttggggtataaaggagctgattttcctcattctcagatgagagaagggttgtagccaaacttactgagcctcggttgccacatctgtctattaggaaaaagtctgtggagactcagggctgcagagagggctcagggagatcaggatgcatggaggttgcggggctgttgtcgaaacactaactttcccatccacttcagaatttcctttttttaaaaaattaagacggagtctcgctctatcgcccaggctggagtgcagtggcaccatctctactcactgcaacctctgcctcccgggtccaagtgattctcctgcctcagcctccagagtagctggaattataggcgtgcgccactgcacccggctaattttttgtatttttagtacagacagggtttcaccatgttggccaggctggtcttgaactcccgacctcaggtaatccgcccaccttgacctccaaagtgctaggattattggtgtgagccaccacgccaggcgtttttttttttttttttttaaattaagatagagtctcgttctacccccagactggagtgcagtggcaccatctcggctcactgcaacctctgcctcccaggttcaagcgattctgccatctcagcctcccgagtatgtggtactacaggcgtgtgccaccacacctggctaatttttatatttttagtagagatggggtttcaccacgttggccaggctggtttccaactcctgacttcaagtgatccgcccgccctggcctcccaaagtgctgggattacaggcgtgagtcacccagctgagcccagaatttcctttcgctgctctttgtggttaaggcaccgagggtgagcaggcaagcatggttatctgagtagtgtggtacctttaagccatgggcaggaattaccttgtctaactaaaggtcaccaacacacagcacgtctggcaggagggggcaggtaagtccttggtagagcgaaggaggagcgaagcagggaaagcactctggggtaatgatgctggctaaccagcacttattgtatgcctactacatgcccagctctgtgttcactgcatggcgccacctaattgcatttgatccacactcccaggtgcagttagacgcctactgtccattttacagatgatgaagtgaagctcagagagggagggtcacttgctccaggtcacacagggagcaaggggcagaactgagattcagaccctgctctggctgacctcagagcccagtgcttccaacacgccccctacaccactgccttcacatcctgatctctctgagccctcctgcagctctgggagtccccacagattttccccattagaaagatgcggcaaccgaggcttggtgaggttggctacagtggttctctcatgtgggagtgagggaaatgaagagctagggatggaactgccagcagggcctcccagttacacagagcagatttaaacttctcttgggctgaagcagtgaaattagcccaaggccaagagccagaaagcctggagtcgagttctggcttggcacctaacttgtgtgcccttctctgagccttaccttattattctcagtagagtaacggtttgagactggataacctcgaagtttggtagctctggtctttgccagtttaataactcacccctgggtccctgaggctgtgctgtctctgacctgccaggatgagttgtggtttcttcattggtgcattcattcattcgagccgtgcttacggaggatgtgctgtgggcttaggccctaggctggtttccaagatgtagacaaaaaacattccagccctggccactggagcccagttaggtaaggacactgacatgtaactgatgagaacagtgtggtcaccactttagtggggaaaggtacagatgtagggagcactgggccagcagttcctaagtctgctggggacactttggcttcctttggtctgagacttcaaggaagaaattttccaggccaacaagcattgggagggggaaggggagaaagagagagagaatgtgtgtgtgtgtgtgtgtgtgtgtgtgtgtgtgtgtgtgtgtgctgggtgtgtgtgagtgtgtgctgggtgtgtgtgtgtgtgtgtgctggggtacagaagacaggaagagaagtgttccaggcacagcagagaaccatcagggggtagaaggacctgtcttatcctgggaattcctagtagtccagtgctgtgtatctttttttttttttttttttctgagatggagtctcgctctgttgcctaggctggagtggaatgcagtggtgtgatcttcactcaccgcaacctacgcctcccaggttccagcgattctcctgcctcagcctcccaagtagctgggatcacagccatgtgccaccacgcccggctaattttttgtatttttaccagagacggggtttcaccatgttggccagcctagtctcgaactcctgacctcaggtgatccacccgcctcggcctcctaaagtgctgagattacaggcataaaccaccgcgcccagcctccagtgctgtgcatctctttatttacttattgtattttgcaaaattgaccaaagtatgtgtctctccagcctgtcaaatgagaatctggaaggccaggatgacaggcaggagccaggttgtgatggttcctgactgcctagaagaggaatgtagcactgatctgtcagcattggtgatgtgtggaagaactttgagcagggaagtggtctggtcactgtgttgcgggtactaggaggagtcgcaggggccagaaaagcctggaggaggctggtgctgttaggtgcccagggcactggaccaggaccctggtggtaggtgaggtctcctgcgtgttcattcactctcccaaggactgactgcctgagtgaggtgcaagggtagggtgagaaaactcagcccggggtgccagaaggccagtttctagagttagatggacttaaccttggcctcattcctcatggtggagagactcctggcagcaaatgctgggaaagaacttcagctccctgggcctccatttctttatctgcaaaatgggaacagtaattataaaagcaataatttttttttttgagagggagtctcgctccgtctcccaaggtggagtgcagtggcacaatctctgctcactgtaacctctgcctcccgggttcaagcgattctcctgcctcagccttttacatagctggattacaggcgcctgacaccacgcccggctaatttttgtatttttagtagagacggggtttcaccatgttggccagtctgctcttgaactcctgatctcaatgatccacccacctcagcctcccaaagtgttgggattacagacctgaaccaccgcgcccggcaagggcaataatttttgaaccccaaatcaagatgacagaataattgaaatgccaattattccaagcttccctgcctccttgcctaaggatagctaatgagggataaagaggttgtcctaggtgccttacttgaattaacacttaatccttccagcaacctcatgaggtaacagcattaccccattttacagagagtgaaattgagcaccgagaggtgccttgcttaaggtaacactaggctggaatccccgtgccacacgaacttcctagtgcatttagcaaccaattccaccacggtccctactcacctgcaggaaaagagcatctaacaaacggcccagcgttctgggaacctgagcaacgggtgcacgcccacacctgaaaaaccccaaaccaaaaaagacccatttgtgaggagtgggcatttgggagagaccctgccatccaagaactcactttgtgtccagcttactcgctaggaattccgcctcttcctgtgtgacctcgggcaaatcggctcacccctctgagcctccgttttctcattagcaaaataagacctccctcccaagtctgtggtgaggacgaaaatcgactcttggcgagtgggacccgctgagtcgttagtactgggtgctttgccccggtccccgccaaatcacggcgccgagccctagcggacccatcgctccggggccgggtcgggaagcgcagcctgggcgagtcgtgcccacgcccggccgcccgcatcctccgcccccgcgccattgccggagtcacctgcaccctgggcccttccttcctcccagcgcgcccgcggcccgggcccgcccgccctccggccgccaccgccctcccttccctgcggccccatccgcccaccccgccgtcccgccgtcccgccgccccgccgccctagcgcgcccgtcccgttgcggcaggtcccgcccccggcccgtctcgcgcttccattggcccgccgcggcccccgccgctgtttgtctcggcttccccgccacccattggcccgctcgggtcctcccaggaagtttgaaaaaaaaaaaaaaaaagttttatgggcggatggaaggggccggggcagcgtcggggaaaggaagggccggaggcgcggcggcgggcggccgagaggggcggcggcggcggcggcggcggggttcccgcgccgcggagcccggcccgagagccgcgtccacgttcctgcctcctgctcccgccgccctggggcgccgccatgacggtgagtgccccagtcagccgcccgcgcccgaggccgggagaagggcgacgacccgaggcagagcccagcctctcccctccggggcagccccctcctcatttcccgaaggcgagaggagggctgggccggaagacggggccacctccgaagcgctttcggccagaccggcctcacccttcccgcaggctcctcctcgccttccctcgcccactcgcccccgggagcccaggcgaccctgaggggacggaacgacccgtctcgggcgccccctcctcacacttgcggcaccagtcacgggtggattcggggcgaccctttcccacctcccctccagccccctagacgaagacccgattccccaaggcggccaggggccccagggaggagcggaggtgggcctgggctggggaggggcgctcgtgggtgcggatgggtcgcgctgacccgggcctgggcaagccagccctccgtgtggccgctggcccgaggtcgggtgggcgagaagtggccggaccgccccacccacagcccgggaggcagtcccgggacgtctgaagcagcgggataccacgtcttcctgggcttgcactttgcagcggtcctggggccttgggacaagcctgcgagtctgagtagggggcatgatggcaggggtttgcctttctcatgggggtgagctgtacccaagccccatcaattacctgtgccatagttagcatattgagcctcacagctgggttcgctggactccccacttcacagccagataaactgaggcttggggaggggcgctggtgagttgcccgaggtcaccccaagtataagagaaggagtagctcctttccctgtccttctggcccactgaccgtgatgttcgggaagggaggggtggggctgcttttggtttctggctagtgcttcagggaggctctgacagcccagtggccctcctgggggaggatgagcagggtgtgtgtgtgcacaggcggcagtaggcctctttcaggggagtggagaccctgcggaggagtgggtgggctgctgggggcgggctgggctgctggggggcgtggcacgcctagcccctgccctgtgagtgtgatggcctggacttcctcggcgtcctcctggacatcctgccacctccctgctggcccttcctgtcgtcagcagcctccccttttctgtcaggagcagaagggatgtggggggaggagctgagtcagtgtcctggggccaggaggagagaagttgccttgcccaccgggtgcctgcccggccctcagccgggtgctttcacgttaccagatttgatccttgaaggttggtagtaacatcttaatcaaacagatgaggaaaccaaggtgtggcgaggtgaagtgtcatgccccaggtaactcagtgagtcccaggctaagccagaatttgtatccaggtccgttccagctttctttcacagttgcctgtcctgggggcagcacgtgctgagcaagggtaaggctgccggaagcagcgtgtggggtgcttggaagatggacagcacatccctgctggtggcagcagccttcctgagggaggtgtcctcctgtgattatagggccttgtcaggtggagatggactagcgaggagacagcagtgtggacagaaacgggtggtcatgtttgagaagtagcaagagcgtagggaaggggtctggggaggagggcctcactgctagggcttggacaggggcaatagagagccatgaaagcttttagagcagagaggaggctatgatcaccattaatagtgttcattgagttcatcctggctgccatgcagacctcagcctgctctcagctggtgctcctcctgtacccacctcacaccctcctcccctggcccccgtgccctgaatcagggatccatacagagcaagtggcacaggtgtgtgagtgtgtgaggctccggggcttcagggagttgggattctcttccaccccttttgcctttgcctgggtgcagctttgctcccggatcagccttccccctcgcctgctgggcatcaaattatatttggtcccttgtttactgtctctttcctacagtccaccagggcaggggccacagctcttggtcacagctaatttcctggcctagaacagtgcctgataactttaaaaaaaaatttttttttctgcaaacactccctgagcccctatctgtgctgggtcctggcaggtaaacagtgtatgtccctgactgtgagttgcatctaatctagcctgtgaaggataagtaaagggcctcaagatagtcacggatgcaacagaggcctctgagaggggccatgggagggcaggacgggggcggctggtggtgcggtgagtggcatgaactgtgaagggacctcagaggtggccattaagctgggtcttaaggcctgagtagccgcttgcctagtcatcggaggaggaggaagcatagtgtttcaggccaaggacatggcacatatgaagggcccggagtcctggtgtgttgtgatcggcaaggaatatgcagtggtataaacaggggcccctcagcaaggggaggccaggctggaagagtgtgatgaggcttccctgccatcctgaggcagctggactttgttttaaagccacctggagaccgggtgtagtggcttatgtgtgcctgtaatcccagcattttgggaggctgaggtggatggatcacttgaggtcaggagttcgagaccagcctggccagcatggtgaaatcccatctctactaaaaataaaaaaatttgctggacatggtggtgggtgcttgtaatctcaggtatttgggaggctgaggcaggagaaacgcttcaacccgggaggtggaggttgcagtaagccgagatggcgccattgcactccagcctgggcagcagagactctgtctcaaaaataaagcaagccacctggagccgtccctggaactgttaagcaagcctgggataccaagcctttttgagtgagtcccgccagcccgagggtgtgtagaggggttgtgtgcctggccaggtaggaggcggggctgtgagaacctgccagtactcccgaaaggcggaaggagaaactgagcttctagcaggtgaagaagaggtagctgggcctgaagagccctgtatgaaggggcatcgtgggagatttagatgatcggaccttttgaccctggggacaggtttccctgccagtttaaaaactcacattggttggccgggcacattggctcacacctataatcccagcatttttggaggccgaggtgagcggatcacttgagctcaggagtttgaaaccaacctgggaaacatagggagaccccatctctacaaaaaaaaaaaaaaaaaaaaaattagctgagcatggtggagtgcttatgtcgtcccggctacttggaagctgaggtggaaggatcgcttgagcccaggaggttgagtcagcagtaagctgtgatcacaccaccacactccagtctgggcagcagagcagggccctgtctcaacaaaacaaaactcaaattggtgaccttctatccccaaggtcactgtgtcatggcgtgcctgacatggtatgtgatgtgtctgtactgggctctggaggatcactaggtttctccttgtacagacacgttcagtcctgtcggaagctgcgggaggggaggaccgccccgtcatttgccacatcaggcagccaggactcagagaggggatgtgacttaggaaggtcacagtgactccacttcccaggcagccctagaggttccagcctgacagcttgtcattcctgccccaatctcccagccctggcccagggactttcgcctgggactgcccagtggtgccagctctgtgggcccaggaagcctggctcctccgggctaggtgggggtaggggagatggcccaaaaagcacagaaatttagaccagggggtagatatttcctcagcaagtttttcctgagccttgctgtggtcaagccccctgcaaggccctggggccacaggaggtcccagactgaggggaagtggagccaggtgtggtcaccaatcttcattcttagcttgggatcgccctgggcagcctccgtctcaggtggaagacggggtgggcagaatacagagcagcgggacaaacgcagccccaggggttctcggccgtgagcagagcctgtgtctctcccttagacaggtatacagggaggggctgggatgccaacctactgggtcccccgactgtggctgtggaaggttctggatcttcagctgtcccaagccccggttggtccacttcctatacctgagaaggggctccgtgggtggagagtgggtcgggagaggtggccaggcagggtggctgtggtttccagctgccactgtcaccgcccactccactgagccatgccacccgttctctgcaggcaaccagacaccttggcctggtgaggcctcgatgtaggggctgataggtaggctcagagccatggcaaccggtggccacctcctccctgccggcgccaggagcggagactgcagagggaccgggacttagatgagagaggtctccccagcaggaagggagggtctggtggttggcacccactagatgagcatggtcagaaaaatatcaggatgagcaacttctttatctaggcctgggtgggggtgcctggcacaggtctccatgggacatgctgcagctggtagcccccagaccccggggctgtgcccccctgggcggcacccagaaggtagggcttgccaggactgacccttcccaaagagatctaggcggggaccagagggtttctgaccccagcctgtgactggctccacctcccatagtctcctggagccgaggaaaggacaggactggcgggcccatgggagggtccgtggggcacttggtcctcgtcagagggaggaactggacagttcgcgcagtgctgctggtctggactgccctctgagctctcagggggtctctatgcaggcagagtcctcccagcccctctctcccattcttgggcgaggggtcggctggagagaggcccctgggacatctgggtgtgtgtgccagccacccagcccaacttcttggctctctgagtgccactatcaggaaaggggccagggctgcctcagtggctgggaggcctgcttggacttgggggttacctagggccttagccctcttggctggcttcccaggagctcggtcccacaggacttggggacagggtgggtgcagcacgctcccctcaccagcccccattggcttcctgctggacccaactcacctccctcctcatctccccacagcccgatctgctcaacttcaagaagggatggatgtcgatcttggacgagcctggagaggtaagaggactgaggccggaggggaggaagctggcttgtgctgctgctgggcccctgggcagcccaggagtgggggtggggctggggctggtgtgagaaccctgggggtggggctgggaggggtggaggctgcccattaggcttctgcctcctggagcagtctgcagtgtgtaaaagggatcacagcaaggggccgtctagcccctcacacccagtgccccatcccttgatctcatcaagagtctcttggccctgccacctcagtaggagcctgggtgggagtcaagggtcttgggtggaagggctcgtagaagctgtctggcccgagacacagattcctaaagcctggtctgaggggggtggggctcagggcgcaggtgctggggtttcacccacctggatccccactggttgagtcaaagcctcctctagtcctcagtggccacgtctgtgacatgggcataatggataatggtgattctttctagagtggataacaaggtcagagagatcaagcacgtacaggtgccacaaagctcctggcacttactgtgggctcagctaaagacccttcccttcctctggcatatgtgtccttggaaccagcagggacagtggctgtttcctcagctctgttctttcggctgccaggctggctccctgcccacactgcctgggcaggagcgtctccccacccctgccctgcatgcgcctgctgctctggtctgcgtgcagcctgcatgccggagagggctttgagccagaggggatttcattgtgtttccggcccacatgttttattccctccagcccacagccttccctacccgctgcctgcccgctgtccctggtggctgctctctaggctcacacaaagcccggcaccccgccagtgaccccttcctggcctccccacccagggtccccggagggcagagggattacaggccccacccagagctggccattagtcatcctctatcacagggttctggaatgtccgaactggaagggccctgggaattcagccagcccaaccccttggtgcacagacaggagacgggcccatgagggtgttggtctcttccaggcctaggagcacctggggcagacccaggctcagaactcagcgcacctgaggcccatggagctccacccagcttccatctcagacagtcataggctaggcctggaagagctaaagaaacctcttggcatagaacccctgtcctactttacagagaggcaattgaggtctgcagcagcaactccgtttacttagtgagaggaaaatgcttctaagaggcctggcctcccagaacaaacccagcaacctggttggtgtccatccctatgccaagggccatgacagccatccacacaagagaggatgggcgccgctcgcctcaccagaaggtctaggcacttctttttttgttttttatttttgtttttttttttctgaggcagagtttcactcttgttgcccaggctggagtgcagtggcgcaacctcggctcactgtgtcttccgcctcccgggttcaagcgattctcctgcctcagcctcccgagtagccgggattacaggcatgcgccaccatgcccatctaatttttttttgtatttttagtagagacagggtttctccatgttggtcaggctggtctcgaactcctgacctcagatgatccacccttctcagcctcccaaagtgctgggattataggcgcgagctaccgcgcccagctatagggacttcttagtagccctactttatggttcagaagactgaagctcagaaaagtggagacacttgcctaaaggcacacagagagaaagggaactcttggatacaaaactccttttctcagggaggcaatgtggaaagaagcagaaggtatcgtcgttgcatgccccttgagaacttaccatcttcttgaggagagaaaactaagtacttgaaacaaccaacagcacagacagggcttggtgatgtgagggaaccctgggagggctggggaccgggtgatatgcactgaccctggcagtgggcgggccgcgactggcattccagtggagtgaccagaagcccagaggtgggctgggcttggcatactatcaggctgttctggcgcccccacccctttcctacatgtcctgccaatctaaccccagctggagcagagacaggcactgcaggaaggcacccaatcacaaatcctaaacttacagcttagggcgctctcacctgctgcggatgtgggtagccagcctacagttcaagaagcagaccgtgcatctgggcgcggtggctcacgcctgtaatcccagcactttgggaggccaaggcaggtgaatcacctgaggccaggagtttgagaccagcctggctgacatgatgaaaccctatctctactaaaaatacaagaaattagctgagcatgatggcgggcgcctgtaatcccagctactcgggaggctaagacaggagaatcacttgaactcaggaggagggggaggttgcagtgagtggagattgcaccattgcactccagcctgggcaacaagagcaaaactcctccatctcaaaaaaaaaaaaaaaaaaaggcagcagattgtggctggcactcactcctactccagggctccatccagtcctacttcccaggggaccattgtccctgaccatggtgatgatctgggggaatatggaaaaagacgtaacgtcctggccccgctgagtccctgacttgcttacacaggtcatcacccctccctgtctgcactgggtccggggtgcctgaggagccttggcaatcttaaaaggagctccaagaaggaaagggagggtgtggttacggaggggaaaccaatccatttcacagatgctacccctgaggctcagagaggaaatggaggggccaggtctcaaattggcattttccgcctccccacccctcctgtgtgcagcatagtgagtttggcagccacacaggacacctgtacaatcacacacactggctctttcattccatcctccttgcagcctccctccccctcgctcaccaccacctctacttcgcagtggaagaaacattggtttgtgctgacagattcaagtctcaaatattacagagactccactgctgaggaggtgaggccatgggtgtactgatgaacccccggaagggcctggggtggcctggctgggttcactggggtgggtcacaccagggcccacacggaccatagtgggccctcttgctccaggcagatgagctggatggtgagatcgacctgcgttcctgcacggatgtcactgagtacgcggtgcagcgcaactatggcttccagatccacgtgaggctgtgtgcagcttgggggctggtggtgggcagcatggctggaggtccctgggggaggttttggtgttgaacatggctcaccatggagactggatcccttcactcatttacccagaggccctatcttcagagccagagctgtgatgccaacacttagcatatctgggggagacgctggagccagcagggctcttcccaggccaatggaagggaggttttgtaccccctgcccaccccagactcaagaccttagatgcatcctgggaaggaagggccaccctccctggggtccatagtggggagggagtcatgcggctggccatgtggcaacctacccatgcggtggccttgcagaccaaggatgctgtctataccttgtcggccatgacctcaggcatccggcggaactggatcgaggctctgagaaagaccgtacgtccaacttcagccccagatgtcaccaagtacgtactaagctggactggggccttgagggaggcacttacccttgcgtccccgagtgggtttctaggtactcacctgagggctgcacctttctgggccctcgtttctctgtcaacaacatgggaagagagtagtgagcattctcggtatcatccagaagtacactgagggtttgaggtttgatctgtcttctcaaatgtgatggggcctcttctctttggaggagatgcctgtgagtcaaaagcccctgccaggtggctgttctgtctctgtgtctgtgccgtgggggccgtgtctaagcctgtgttaggaaggggtggttaggtagttcagccttggcgcccacacctcccgggatggggagctcactccttctggaggctgccacgggcactggggcaggagggctgagttaccgagtggcagagccccccacagtttatacccagatgcccatggcgggctgggacttggagctgctgggcagcgggaacagagtgtggtattaaagggggctgggctgggtgtagtggctcacacctgtaatcccagcgatttgggaggctgagatgggaggatcacttgagctcaggagttcaagaccagcctgggcaatatagtgagacctcgtccctacaaaaaatttaaaaatcagctggccgtggtagggtgcgcctgtcagctgaggtgggaggatcacctgagcccggaggccgagtcccccagactggccacaccgcggctattcagccttaggccagaggctttcctgtctaggtttcagagtccccatctgtcacgttagcatgtcatgtctgtacatgtgccaggatgtgcccagagcactttgtgaactctgaagcactgtgcagttggactgttatttagcatctaggcccagctgctttaagaaagaaaccccgggcacagtaacttcatcgagatagatgttcatgtctcccttcagaacagccccgaggtatgcagtcctggcctggtggggctcgctctgccgtttcaggggagccacctgccacacccactcggcagcctatagtcacatggctacaagtagctgtgggaatactgcgagtgtagtttttggcagggtgaccacgtacccagctatgactgtggataaagagaattgccatagttgttcagagtctctgcaacttgtgttctgtgcaccccgaggtcccgccttcaccccatcagcagtgactgggcatcccccttgccactgtgagcctcgggaacctgggacattggtctcctacatcacctcattgatcaccatttgcaaaaagccccctgcctgctttccacgttcgcccaccctgtcctcacatccatcctgtgagaggcgtcgctgtcccacattacagatgaggtcactgaagctcaaagagggcaaagagaccagtgtggtggttcacgcctgtaatcccagagctttgggaggctgaggtgggaggagcacgtgagcccaggagttcgagaccaacctgggcaatatattgagaccccatctctatcaaaaatttaaaaaattagctgggcgtggtggtgcatgtctgtagtcccagctactccagaggccgaggcaggaggatcacttgagctaaggagtttaaggctgcagtgaactatgatcacaccactctacttcagcctgggcagcagagtgagaccctgtcccttgaaaaacaaaaacaagaacgggggcgagggaagccgggcatcctggtgggtccctgggctgtcaagaggtggagctgggatgttcctggggtctgttaaccaggaagctcaggtcgggctgcttccttccctggggtctgtctccagcccctggcacagggcctggcacacaggtgtcgctccaaaagtgctcattgtgggactgcaggggtgaggacccacctgacgtggctctgctggtgccctaggctctcggactctaacaaggagaacgcgctgcacagctacagcacccagaagggccccctgaaggcaggggagcagcgggcgggctctgaggtcatcagccggggtggccctcggaaggcggacgggcagcgtcaggccttggactacgtggagctctcgccgctgacccaggcttccccgcagcgggcccgcaccccagcccgcactcctgaccgcctggccaagcaggaggagctggagcgggacctggcccagcgctccgaggagcggcgcaagtggtttgaggccacagacagcaggaccccagaggtgcctgctggtgaggggccgcgccggggcctgggtgcccccctgactgaggaccagcaaaaccggcttagtgaggagatcgagaagaagtggcaggagctggagaagctgcccctgcgggagaataagcgggtgcccctcactgccctgctcaaccaaagccgcggagagcgccgagggcccccaagtgacggccacgaggcactggagaaggaggtaggcaccacggctggctctctaggaggccccttgccccagcgcccctccagtccctgcattcatgccctggcatttgtcttgcactcctacagtgatggggagctcacccctgatctgctgtgagtgtgcaccccacactcctgcgaactagaatcttcttccttagaccttagtagtttggtttggttttgttttgttttttcctagttctgcccttagcagccatagagaagagaagtgggaagagaagggagagacctgccaggctcacacctgtaatcctaacattttgggaggccaaggtgggagggtcccttgaagccaagagtttgagaccagtctgtgcgacatggcaaaaccccatgtctacaaaaaaatacaaaatttagctgggcgtgctggtgcatacctggagccccagctacttgagaggctgaggtgggaggatggctggagcccgggaggcagaggatgcagtgagccaagatcaagccactgcactccagcagtctggcaatagagcccgactttgtctcagattaaaaaaaaaaaagaagaagaagaagggcgagaccgtttattgttcatcttctgcccgtggcctccctgcctgcactgactcgtggaatcctcacagcggcctctacccctagggtggacttcagcagttttactgacgggaaaactgaggctcaaagatgtttcctctgtcacctccatgatgtgtaaacatctgtgaccacagtttccttttcctatccctgtctagccttctctgggccaaggctctcccaggtcattgacctggccatccaggaaacagcccagcgtgtcccctggctacatctcactccagggctgcttgcccttctcaaaccctgaggcattcctaagccttccagggacgctgggcttgtatccgtgtggagctggaagcctgcgggctcctcactgccttccaccagccctgccccagcttccaggtcccactgaccacccttctccctcgtaggttcaggctcttcgggcccagctggaggcgtggcgtctccaaggggaggctcctcagagtgcactgagatcccaggaggatggccacatccccccgggctacatctcacaggtaaggccggggggctgtttttcagggggagggggcagatttctgcttgccgtgttatcaggaaacagctgagattttgggagcccttcctgtgtgtgctggaacctgtgtggggcatttgacatgcgtcatctcatttactctccccacagctggtgggcgtgatcactgtgcccgttttacagacaaggccactgagctctgagaggttatgtgacttgcccaaggtcaccccgcctgcaggtctcaaaggtgggatttgagcgagggtccggctgactgcagagcctgtgtgtgagtccccgtgtgacactctgcacttggacccttgccccggggaagtggggggctagtggccccgagagtcactccctgaacacagggaaatcctgccgaggcccactgggccaaggccccacacaaggaggtctgcaggacaggggagcctccagtagccctcagagaatgcaccgtccgcctaggacagcggttctcaacggggtccattttgtcccccttggggacatttggctgtgtctgggaatacttctggttgtcacaactaggacaaactaactctctagaaaaaacgtgtgtgtgtacacatatataagtttattataaattttaccaataaaaacaatgcttagtacacaatttacaaataaaaatatataattttattgtgaattccgtacagcaaatggatttttctcagaatgctttcagtgattttttccatactcttgtatccacaactgattaacaaagggggttgttctaacgtgtgctggttgacatttttgtttatggtaatgagtaagatgagaagacatttgtcgaaactttactggtccatgttgtcagctacttctttgctagatcggatagtagttttctattgagaatatttgagaatattctattaagaatatttttgcaattttttgttctatttacaatgtaatggttatagatgtgagatacttctaagtttaatctgcattattagcattttcttatcacttgcttaagtctagacaatcaacaaaacaataaatcaagccctgatgtgtaatgtttaccaattctgcagtgtaaatactcccgctgtggccaatgctgcattaccagcacaaagtccctggacagagagttgggaagagatgtcacactattcactaggatttccaccatgcggatacagtagatgtgattggccccaagagcacgcataatacaacacagtgaaatatttaggaagtaataaatttgagtatctattgccttgtctttaacatagttaatttaaagtatataaatttaattgttaatggctgtgcttaacaactacatcacagaattactaaaaatttgacaatcagctgtctgtagttatcacaccattatctaaagtagaaaagaaggggccaggcgcagtggctcacgcctgtaatcccagcactttggggaggccgaagtgggcagatcacgaggtcaggagaacgagactaacctggccaacatggtgaaactccgtctctaataaaatacaaaaaatagccgggcgtggtggtgcgcactgtagtcccagctacttgggaggctgaggcaggggacccactggaacccaggaggcgcaggttgcagtgagccgagattgcgccacggcactccagcctggcgacagagtaagactccatctcaaaaaaaaaaaaaaagaaagaaaagaaaagaaggctgagatctaggccctaggcaggaggagccttctaaaaatttccaaggggaggtcacgtcatgagggggctctcaggaaggcattggctggggcatgagaaggaaggctggttggtgcgtattgtggatgcctccagtgctgagctaatagttagaagctctggcctggtacggtggctaatgcctgtatctcagcactttgggaggtgaggtgggtggatcacttgaggtcaaatgttcgaggccagtgtggccagagtggtgaaaccctgtctctactaaaaaaaaaaaatacaaaacttagcagggcatggtggtgggcgcctataatcccagctactccagtggctgaggcaggagaatcgcttgaacccgggaggcagaggttgcagtgagctgagatcctgccactgcagcctgggtgacagtgagactctatctaaaaacagcaacaaaaaacaaaacaaacaaaaaaagagaagctcattccacagacttttggaggtttggggtcagacagtgacatcaggaaagtgatgttggagtggagggggcttgggagagggccaggtgtaaggcattaggaaatggctgaaggagggtgaatgtcaagggtctggagggaggagaatttgggactggatgaccagatctacggaaggcagaggggcctttgggggccctgaggctggggctgctgctccagggaagcccggagaccgtcctggggccaagtagtggatggagtttccactgatagaggagcaggcaggggaattggggtgggacgcagagggtgaggctgggggcttaccttgtcctggggaggggcaggggaggagccagtgttgtgccctgtagcctcccaccctgaggcagagaagggagctgggggcccaacaccccagctgaggcaggtgggagggcctccgaggcccccagccagggggcttctgcctgcgtgctctgctctaagaagctgcaggggctgctttctgggtgggtggggctgggacccattcgtacccacctataatcagagtggcttcatcttcctccattttattttattttaatttttttagagatgaggtcttttactgtcacccaggctacagtgcagtggcacagaggctcactgcagcctcgaactctagggctcaagcagtcttcccacctcagcctcctgagtaggaaccacaggctacaccaccatgcctggctaattaaaaaaatttttttgtagagacaaggtctcactatgttccctgggctggtcttgaactcctgggctcaagtgcttctctcatgttggcctcccaaagtgctgggggtacaagtgtgaccactgcactggcccacctttgtccgttttactcatagagccagctttagatttcctttagataaaggctctgccactacaatgacgtttaaaaggcactgctttggcttctcagcttactggtggcaaaactgaggcccacagaagggtgtgacctttgagctataggcagacctgtgtctggagttcaggcggtctggtccccaggtgccccattgggtgcaccaaagtctgtcagtgtttggtcccgttagggtgggatgggcacggggagcaggtgggaggggagaagggaataactggggagcagagctgaagaccaggcaggtggaggagtgaccccagatgcggaaggcagcagagaagaagagctgagtcatctgtatcgccctcaggcacgggaggaggcggatggaaattcggtggacctggaggagtgacagctgggagggattccccagctggtatctcgggctgagtgggtgcccttccttcaggggttgggggcttgctgctgcacgacagctgtcgggtggtctggggcttcacccactggacatctggtaaagagaacctttccccactattgcagtggggacagaggcatttctttatctactttgatgtccatgtcaaaggtggcagccaggatcaggacaccttgggccactcaggaaggtaggtgagagaggccctaggagcccctgttcgtcagctgagtcccacctcctgatgtcagcccctgcacccctgagctgctgggtctgcctgcctggtctggccctcttcagaagagcagtgcccacccccacattgctgggctccccactggtggatgctggcgtaccgtctccctctgtgcacagggttcccgtgcccagggagcctcgggggctggtcctgtgaggcctgctttacggatgccaagactgaagctcagagggggcgaggggtttgttcaggttcactccaaggcgcagccagggtgaagaccgcctctgaggtccaaagtcatgttctgttgtcctaagccaggagacacatagagggcaggaacagaagccaggggacagacacccctgtcgccacatgaagctcttggccctcgctcctccatcaaatcgtccccaggtgtggctgctggagaggcggggaggtggcctttgcgtgggggagacagtccctcatctggtcctctgtgccttagtttcttccctggctcttcttccccttccctttttaatgaccttaaacatttttttaattatataaaagaaatgtttacattttcaaaaataatttaaacaaattgaaaggctggaaatcaacaccctcacactccttctgctgccagctgccaccccagggtcctgtcggtggctgctgccgcctgcctatcagtttctggtggcagctgtaacctgtaaccacagctacctaaataatgcacatgtattacctcacgcttctgtaggcgagaagtctaacgcgagtcttgccgcgctgcagccaaggcgtgggcaggactgtgttcctctgcaggcacccgttgtatcccttgcctgctccagcttctggtggccgtccgcgtcccttggctctcggccccttccttcatcttcaaagcctgcagaggggaagtcgagtccttctcctgccacgtcactctgaccatcccttcctggtcacacctcccttgaactcttcgcttctgcccccttcgtccacttttaaggacccttgtgattacactgggcttgagggataatctgggataatctcccgattttaaggtcagctgattagcaaccttgattccctctgcagcctgaattcctctttgccatgtaacatgatgtagtcacagatcctgggagtaagatgtggacaactttgaggggctatcattctgccccctacaatatcctccctaccttttctgtgttttctgtgttttccattcactgggacggacaggtctgcacgtttgttcccgtgagtgagatcataccacgtgtatgtcagaagccaactttcaccacctcattttgggatctttttccacagcatccacacaaaaactctgtctagcagctgcctgtgtcccattgtcaagctcgatcccatcatttattcaagagttcccctgatagggatttagattgtttccagttttcatctgttaccaacctggctgtagggaatacccttgttccaaaagtctctgtacacatacgactttctgtgggatcatttctgggagtgaacctactaggtcaaccagtggggtcgcaaaatgtgatgatgccaccggaccacccccaacacacaccgttgtggcggacactcccagcagtgggtattattagtctgagatacttgcccatcttgtctactaagcattattttgtattacatcatcagtttcagctcatttactgagcacctgccacatgtcaggccctggcctagaccctggggactgcgccagtcagatgttctcagtcttcagggaatttatggtttggcagaggtagaaccttttgaggcaggggagaggctgcccagagacagagctaggagagacatttaaactgggctgcaggtcagtaaattacccagggaggtaaagttgccaaaaaaacattccaggccgggcacagtggctcatgcctgtaatcccagcattttgggaggccaaggccggcagatcacaaggtcagaagttcaagaccatcctggctaacacagtgaaaccccatctctactaaaaatacaaaaattagctgggcgtggtggtgggcacctgtagtcccagctactcacgaggctgaggcagaagaatcacttgaacccagaggtggaggttgcagtgagctgagattgctccactgcactccagcctgggtgacagaacaaaactctgtctcaaaaacaaaaacaaaaacaaaaaaaccacaaaattccaggcagtgggaatagctaaagctcagaggtgtgaacgtgctgcaaccgtaactgtgagattgcttggcagagaaaggccagggatgagaacgtaaaggtcagccatgggaacggggacttgactctgtaggacgaggaatccctggagggcttgaggcaggagcgacaaggtgaggtttgtgaatgaggagccgtggggtgggggtgggagcaggagcaggtgcagactggaggtgctgggacccaggaggaggtggtgtacctgcccctgagccttctcctctggaggctggggaagggccgctgtccagaggaacggggcagcctgtgacaccctggcgtccggcccacaggaggcatgtgagcgcagcctggcagagatggagtcctcgcaccagcaggtgatggaggagctgcagcggcaccacgagcgggagctgcagcgcctgcagcaggagaaggagtggctcctggctgaggagacggcagccacggcctcaggtatggaccctggggggggcacagtgggctgggctctgagcctctgtgctgaggttcctcctagccaaactggggaggattttatcaaataagatgtaggggtctcagtgccacatttggggtaaagggtcagcaggtgttagaagctccaagaactggcctgtagccctacttaaaaagggaaactgaggcagtaaaagataccctccccacccccaacaccaccactaccataggtggtgactcttcctgctcaggggcctgcagccaccatagagtctgcctaaaggcacatgctacccacgtgcgtgggggagaggctgatcagctgcatcccctgtcctcataggagtgcctcctccctgggcacatgggccagaccctggggagagcaggggaaggtgtgagcattgtccatgccagctgtgtgccaggcactgggccccacatgtttcccacaggagcacccttcatcctggacaattccctcccctcctgccaccgcacacctgctgtgtgcctggcacattcctaggcatcactaggggtttgcagaacaatagaaatgctggccaatgtcacatgatctgaagctcacaacctgccagtgctgtgccaagtgctcatgcactcgaacccagccttggggccagtgtgctctgcatttcaggaagatcgcctttgcagccgcgtgtgttagagaccccttccccctcagcagagtctggacttcgccctgtaatctggcactaaggtttctgctgtgaaatggataaaaatcacacttaagtggaataataaagaccataaatagcctcatgtccgttcagggtggggattgccaccaaaagatttaccagaggcccggtgcagtggctcatgcctgtaatcccagcactttgggaggctgaggcgggcagatcacctgaggtcaggagttcgagactagcctggccaacatggtgaaaccccatctctactaaaaatacaaaaattagctgggcgtgatggtgggcagctgcaatcccagctactcaggaggctaaggcaggagaatctcttgaacccaggagacagaggctgcagtgagctgagattgcaccactgcactccagcctggatgacagagtaagactccatcaaaaaaaaaaaaggccaggcactgtggctcatgcctgtaatcccagcactttgggaggccgaggcaggtgcatcacgaggtcaggagttcaagaccagcctggccaagatggtgaaaccctgtctctactatgaatacaaaaattagccatgcgcggtggcaggcgcgtgtaatcccagctactcaggaggctgaggcaggagaatcgcttgaaagtgggcggcaaaggttgtagtgaaccaagattgtgccactgcactccagcctgggtgacagagtgagactccgtctcctgggtgacagagtgagactccgtctcctgggtgacagagtgagactctgtctcaaaaaaaaaaagaaagaaaaaaaggagagaaactttcaatgttcagaagtttcggattttagaattgtgggtaaaaccatgggtggccctgagtgggaaaaaaaaagcctcggtctcagtccttaggagctcacaatctgagaataaagccagcaggagctaatgttggggcatttactctgagccatgctttgttctaaattcttcacacaccttccaataaccccatggaggaaaggtactgttgttatcgatccctgttttccagataagggatctgaggcacaaggggttaagtcacctgtgcaaagtcacatcggtttatgctgactgtggagcctgagctcttgaccacgaggctggtcaaagcagataggccttgtttgagagccctcagagtctgcagggggggtgtactaggtggggtcctacctggaaatcactagaacaggaggtaccaatggtcagaccctgagctgtctccccagtagggtccatccaacaggattatcttcccttaatagatgggctgagagaggttgagagcttaccccaagccactcagtttatgacacaacctgggctactctagactcctggttcggtgctctttgcatagcactccttggtccaagtccatagtacttgcatagtactatgtggagtccacatagtactccaccagtacatgtggcgtctcagagctggtggcacttggtgctgctgacccccctccagtctctcttgtgcctctctgccctgcttccagccattgaagccatgaagaaggcctaccaggaagagctgagccgagagctgagcaaaacacggagtctccagcagggcccggatggcctccggaagcagcaccagtaagatgatgccggggcccaactgcccaccctgatggttatgggttgaggaactttgctgaggccccttggcagcggacacatcagtttgcccctagctgagattcctgctccagtctcatggatgcaagaaacagaagcagaaggtcctcaggcagaccccatgccagtcctcacagacagtccttcaggcagcttcttgtcttggctggtcccagcctccacccacctcttcacccctttagtctcccctggagctgggctgcagtgtcactgttgaccactaggcctctccctgccccagagcacagttttggaatgttgaggtttcaggggctttaactttaaagatgggcccctccagccgggcacattggctcatgcctgtaatcccagcactttgggaggctgggatcaggagttcgagactagcctggccaacatggtgaaaccccatctctactaaaaatacaagctagctgaatgtggtggcgggagcctgcaattctagctacttgggaggctgaggcaggagaatcgcttgaacccaggaggcagaggttgcagtgagccaagattgtgccattgtattccagcctgggcaacaagagtgagagcaagactccatctaaaaaaaaaaaaaaagatgggctcctccaagccaccctcacttagggtaaacacctgtagcccagagaagctgtcactggttcacagccccacagcaggctaaaggcaaacctagagagggaaccccagagtcctgggatgctttaagtctacctgactggactccaggcttggcaggagcaagacaacctatgctctcctctgctcctcctctggggcaggtcagatgtggaggcactgaagcgagagctgcaggtgctatcggagcagtactcgcagaagtgcctggagattggggcactcatgcggcaggctgaggagcgcgagcacacgctgcgccgctgccagcaggagggccaggagctgctgcgccacaaccaggtgggcctggccccaggttggggggacacgggtgggtcccggcacccctcccctgaccaccgtgcctctcccaggagctgcatggccgcctgtcagaggagatagaccagctgcgcggcttcattgcctcgcagggcatgggcaatggctgcgggcgcagcaacgagcggagttcctgcgagctagaggtgagtgtcctcactagcaccaggcagcccagtggttctcggggcccggggctatggggcacccccgccataggctgggtatcacctgtggcaggaaagccaagtctcccagtggctgggccagcctgactaggctagaacacctactgtgcatccagtagccagcattctgccctcccacctgcattgtgtcacctacctgccgtgtaccatagcaaatcactccacttttctgagtcccagtagctcatctgtaaaatggcaccagcaccttccttactgggaaatattggggtaagaaaatatgtgtgtatgtgtgtgatgccagtatcactgtagtattttctttctttttctttctttctttttttgagacagagtctctctctgtcacccaggctggagtgtagtgacacgatctcagttcactgcaacctctgcctccctggttcaagcgattctcctgcctcagcctcccaagtagctaggattacaggcctgcaccaccacacccagctaattttttatatttttggtagagacaagtttcactatgttggccaggctggtctcgaactccggacctcaagtgatctgcctaccttggcctcacaaagtgctgggattacagcatgagccaccacacccggccttagtatttatttctttactttttttttttttttgagacagagttttgctgttgttgcccaggctacagtgcagtggcgcgatctcggctcaccacaacctccgcctcccaggttaaaacgattctcctggccgggcgcggtggctcacgcctgtaatcccagcactttgggaggccgaggcgggcagatcacgaggtaggagatcaagaccatcctggctaacacagtgaaaccccgtctctactaaaaatacaaaaaaattacccgggcgtggtggcgggcgcggtggcgggtgcctgtagtcccagccactccggaggctgaggcaggagaatggcatgaacctgggaggcggagcgtgcagtgagccgagatcgtgccactgcactccagcctgggtgacagagcgagactccgtctcaaaaaaaaaaaaaatattaaaaaaaaaaagcgattatcctgcctcagcctcccaagtagctaggattacaggcatgtgccacctcgcctggataattttgtatttttagtagagacagggtttttccatgttggtcaggctcttctcgaactcccaacctcaggtgatccgcccacttcggcctctcaaagtgttgggattacaggcgtgagccaccgtgcccagccgatattttatttctctttttttttttgagacggagtcactctgtcacccaggctggagtgcagtggcaccatctcggctcactgcaagctccgcctctcgggttcatgccattctcctgcctcagcctcccgagtagctgggactacaggcacccgccaccacacctggctaattttttgtatttttagtagagacggggtttcaccatgttagccgggatggtcccaatctcctgacctcgtgatccgcccgcctctgcctcccaaagtgctgggattacaggcgtgagccaccgctcctggccccaatattttatttcttcaacaaacacttaggtgaggctcactctgtacctagaaattctggaagccctttttgtctgttaactcatctaatcttcctgacagctccatacattagctactatgactgtccccatttacagatgaggaaactgaggcacaggaaggtcaagtaccttaccaaagcttttatagctggactgggatttgaaccaggcagtctggctccagtctgagcttttaagcctccccagtcctggctgaacttgtttcctccttggtcaagtcagcagcacctagccctcggggttggggaggggttaatgaggtgccttgtggagtggttcagcctgctcaggtttatgtagggcttcttttcatccatctcactcccgaggtgagagcctggtgctgcatgagggctgcagcagacttgaccgtgagatatccactcacacgggctggacaggggtgagagtaagggaaggcaaagcaggggaatcggagagggcttcctggaggagtccgcctccaggatgtagagggtttttgtgcagataggggctgcattctaggggcctgaggcagagagaacccgggctgcagggcactatgggccagggtagctctggcttctggccctgggtcagtccagcacctatatccccaggtgctgcttcgcgtaaaagaaaacgaactccagtacctaaagaaggaggtgcagtgcctccgggacgagctccagatgatgcagaaggtaggtccttccgctgggctgggggccgtcggggactctggagccatctggatgccatcctgtgagcacctgctctgtgccaagccctccactcgcttcatccttcctcaggctctcctgtgcttctcccatgtaggtgtcatcatccccattcactgacagggaaactgagactaagaaaggggaagtgacttccccaaggctgtacttggcttctgtttatttagcattatttaatttattgattattattgagcacctactatatcctgggcactgtgctaggtgctgggaagacagatgtgaacaaaataaccccaaatctctgctgtggggagcttgcactccagtgagaataaccacgttgctaggagttgggtgggtcagggttcagcccaggtctgagtctgcagcccgcctggcccacccttggctgctatgtcactgcctggtgcgctctgtcagtttggggcaggaagtggacatgttggtggctctgtaagtgcacgtgagccagaccgtgtttaccgcacttgaagaacaggtggcgtgaactcacaggaagggcccgagcacccagccaggctgacctggttctcatcccagccactcactgccctgcggtcttggtcaaaatcttctcccccgaaacaggatgaggatgacaatgacgcctgtgtccctgggtggtaccagggaggtgggaggggtaagcccagaacccacggccatcttggggagccacctggagggatgaagcgaggtatctgcggggaggtctggctgctggtgctgcccatgtgcccggttggcagggctggagggagagacttcatgccctcatacctgcctcctgccccccaggacaagcgcttcacctcgggaaagtaccaggacgtctatgtggagctgagccacatcaagacacggtctgagcgggagatcgagcagctgaaggagcacctgcgtcttgccatggccgccctccaggagaaggagtcgatgcgcaacagcctggctgagtagaggtggatgccgaggcgtgtgccctgcagggtgggcaggggctgaggctctcccacacccgggactccctggaccaccccagccaggccacttccttcttctggcctccaattcccgttctgtaaaaaggacaatgaaaccagcaacacggggttgttgcagagatcccatcagacccgggccacaggctgcttcatcagcttaagcctgttcctccagagctgggcggcacagtgcagagccacagcctactcagtgcaccccccttcttggggctggaggcaaatgcagcgtgcacatccctgacccccacagtgaatctccactgagcttcacacacacacatcgcacgctgaggccgggcttctatcccagttagtcttaacactccttcttgacttagcagggctcaaagtggttggttggttggttggttggttggttggttggttggttggttggttttggttgctttgagaaaggtcttactctgacacccaggctggagtgcagtggtgcaatcacggctcactgcagcctcaacctcctaggctcaagggatcctcccacctcagccttctgagtagctgggaccacaggccctcaccaccatgcccagataatttttgcactttttgtataggtggggtttcgccgtgatttcccaggctggtctcgaactcctgggctcaagcaatacacctgcctcagcctcccaaaattctgagattacaggtgtgagccgctgcacctggccaaagtgttcttatttttgctttttcaacgccacatctacctggagcatcctctttctgataagtcctcatggacttcctatggcatgcaggagaggccaccctatggctgagctgcttgggaaggagccaggaagagcggatctggctgtaccttaggggctgagaggtggtggaaggacccactcagcacccttgcttggccttggggtggcctcgcagcccctcagcccaggcctcagccctgccgcaccttgtctttcaggtcccgcccagctgcagaccctccaggctggaggaccagccgccctccttccctcctggatggaagtaaaaagccaagctttctccccaccctctgtgggccacacgtgcacttgcacccaccacacacacacacacacacacacacacacacacagacacacagacacatacgcacacacgtgcacacatgtacacacggatacacacacacacacacacactgcatatctgagcgcgcccctcgcactgggtctcaccttgcaccttcttcaggattttatatgtgaagagatttttatatagatttttttcctttttttccaaaacactttatactttaaaaaaaaaaaaaaaaagcaattcctggtggctgtgtgcctccaaccctggtccccctctgtctccagccaccctctgcttgggcttctgagctggtggccctggcccagaggtctggcggaggcccaggcagcagccatggcggggtgtctctacaggggagaggcgggagcctgccaccctcttcctgccctacctcctactaacacttcctgccccatttggacccgtaccatggggctcaggacagagggagctagcagctggcctccatggccccacagcctccttcgaggctgtgctgggtgcagaaccgccagagccacccaaaaggtgtttctcttctgctccctgaacctcttaacttaataaaacgttccagcagctctggtgtcctagatggctggcagaacaggaatggagattggggtttcttgaagtggcttccccactcacaccctacccacaccccacccttcctaaagcagcggcctctaggcttctgagggtggggctgaaaatccaaggtctcccttagtacagactgtgacgcccccagtgtggcttgcaggctagtggcagcggaagcatgtgggaaatagcaagtccagtcccaccccaacctactgaaccagcgtctgcattttaacagggtgccccagtgattcacgtgaccttcaaagtctgaggagccctggagtagggcccagggcccaggcctgagagagaggcctggggctaagactagccctgaccatgaccttgggcaagtcacacccctcactgagcctcagtttgcttctccatcaaatgggtgtttttctttcagtcccagtcctctcctgaggcttttcccagaggtcatgcccagccctgggcaggggtgagggcagggttgtggctgccaggcacaggtccagcgggctgggagtcctcaccatggctggctgtgctgattatggttgcatggggctgggaagaggtcccatttctgagccacagaaacaggccacatccagtaggggtcctggaaggctgtgagaacccagaggagaccctgacccagcctgcaggtagaagactgcctttggaggcagctttgaaagatgactcttccagatggaagaatcaggaagggccttcccacgtggaggcaccagcaggagcaaacgtccctggtgtgttcaggcaaagagccacaggagagtgacctcgtggagtgggaagagattgtttcccattcccttgccagggattggttgaggaatggacaaggcttgcagttcacgcaagccagtgaaatgcgaggggaagtcttgggagtggggtggaggaggtcatctgggaagggtgtccttggtcttaaaaagaggcacaagaggccgggcgcggtggctcttgcctattatcctagcactttgggaggccaaggcagggggatcacttgaggtcaggagttcgagaccagcctggccaacatggtgaaaccccgtctctactaaaaatacaaaaaattagccagacgtggtgccaagcacctgtaatcccagctactcaggaggctgaggcaggagaatcacttgaacccaggaggcagaagttgcagtgagccaagatcgcgccactgcactccagcctgtgtgacaagggcgaaactccatctcaaaaaaaaagggggagggtggcgcaaggagaggacacctctctcctggccctgtcgccatcttccctcatcaatagctaaaaatggcaaagaagaaagagccaggaccccgtgccatcaaatcctccggccttgtgctgccctgtctcggcactgcttgccttaggagatcaggagtgttcctagccactgggagatgggatgcctgccactggcagctctgccgtccatcctcaccatcccaccgtccccccaagacagctctccatcccatcctctgcctcccttctagcctcaacctaactcagggctcccccgtctcacacctgggttgcaggaacatcctcttcaccaacccccctcccatccctcctcagggctgcctagggcagctacaaaaaccaggccagcctctgaaaggtgctccacatctcattaaaaaccgtgaaatcgcactgccccactatcagaatagctcagaggagaaggtctgccagtaccaagtgctggtggggatacggagaagagcagctcccaggcgctgctggtgcaaatgtgctttgttgcacccacggcaggaaactgaccagcttctcatcaagttaaatacgcatctaccctatggcctagcatttccactcttgcttacacatccaggagaaatgagtccttacatgcacaaaaggatgagtaccgtaatactcacatcagcaaataaacaatacagctgtgtgtcagtagtagaatgaataaattgtggtcgattcata

SEQ ID NO: 34 - protein, 1810 aa, Homo sapiens
MALSLWPLLLLLLLLLLLSFAVTLAPTGPHSLDPGLSFLKSLLSTLDQAPQGSLSRSRFFTFLANISSSFEPGRMGEGPVGEPPPLQPPALRLHDFLVTLRGSPDWEPMLGLLGDMLALLGQEQTPRDFLVHQAGVLGGLVEVLLGALVPGGPPTPTRPPCTRDGPSDCVLAADWLPSLLLLLEGTRWQALVQVQPSVDPTNATGLDGREAAPHFLQGLLGLLTPTGELGSKEALWGGLLRTVGAPLYAAFQEGLLRVTHSLQDEVFSILGQPEPDTNGQCQGVFFLTLSLLGNLQQLLLWGVRHNLSWDVQALGFLSGSPPPPPALLHCLSTGVPLPRASQPSAHISPRQRRAITVEALCENHLGPAPPYSISNFSIHLLCQHTKPATPQPHPSTTAICQTAVWYAVSWAPGAQGWLQACHDQFPDEFLDAICSNLSFSALSGSNRRLVKRLCAGLLPPPTSCPEGLPPVPLTPDIFWGCFLENETLWAERLCGEASLQAVPPSNQAWVQHVCQGPTPDVTASPPCHIGPCGERCPDGGSFLVMVCANDTMYEVLVPFWPWLAGQCRISRGGNDTCFLEGLLGPLLPSLPPLGPSPLCLTPGPFLLGMLSQLPRCQSSVPALAHPTRLHYLLRLLTFLLGPGAGGAEAQGMLGRALLLSSLPDNCSFWDAFRPEGRRSVLRTIGEYLEQDEEQPTPSGFEPTVNPSSGISKMELLACFSPVLWDLLQREKSVWALQILVQAYLHMPPENLQQLVLSAEREAAQGFLTLMLQGKLQGKLQVPPSEEQALGRLTALLLQRYPRLTSQLFIDLSPLIPFLAVSDLMRFPPSLLANDSVQQGYRGSEENSLEEDKGLRPMTPRSLAAIRDYSPGMRPEQKEALAKRLLAPELFGEVPAWPQELLWAVLPLLPHLPLENFLQLSPHQIQALEDSWPAAGLGPGHARHVLRSLVNQSVQDGEEQVRRLGPLACFLSPEELQSLVPLSDPTGPVERGLLECAANGTLSPEGRVAYELLGVLRSSGGAVLSPRELRVWAPLFSQLGLRFLQELSEPQLRAMLPVLQGTSVTPAQAVLLLGRLLPRHDLSLEELCSLHLLLPGLSPQTLQAIPRRVLVGACSCLAPELSRLSACQTAALLQTFRVKDGVKNMGTTGAGPAVCIPGQQPIPTTWPDCLLPLLPLKLLQLDSLALLANRRRYWELPWSEQQAQFLWKKMQVPTNLTLRNLQALGTLAGGMSCEFLQQINSMVDFLEVVHMIYQLPTRVRGSLRACIWAELQRRMAMPEPEWTTVGPELNGLDSKLLLDLPIQLMDRLSNESIMLVVELVQRAPEQLLALTPLHQAALAERALQNLAPKETPVSGEVLETLGPLVGFLGTESTRQIPLQILLSHLSQLQGFCLGETFATELGWLLLQESVLGKPELWSQDEVEQAGRLVFTLSTEAISLIPREALGPETLERLLEKQQSWEQSRVGQLCREPQLAAKKAALVAGVVRPAAEDLPEPVPNCADVRGTFPAAWSATQIAEMELSDFEDCLTLFAGDPGLGPEELRAAMGKAKQLWGPPRGFRPEQILQLGRLLIGLGDRELQELILVDWGVLSTLGQIDGWSTTQLRIVVSSFLRQSGRHVSHLDFVHLTALGYTLCGLRPEELQHISSWEFSQAALFLGTLHLQCSEEQLEVLAHLLVLPGGFGPISNWGPEIFTEIGTIAAGIPDLALSALLRGQIQGVTPLAISVIPPPKFAVVFSPIQLSSLTSAQAVAVTPEQMAFLSPEQRRAVAWAQHEGKESPEQQGRSTAWGLQDWSRPSWSLVLTISFLGHLL

SEQ ID NO: 35 - DNA, 5433 bp, Homo sapiens
  source 1..5433: mol_type = other DNA
atggctctcagcctctggcccctgctgctgctgctgctgctgctgctgctgctgtcctttgcagtgactctggcccctactgggcctcattccctggaccctggtctctccttcctgaagtcattgctctccactctggaccaggctccccagggctccctgagccgctcacggttctttacattcctggccaacatttcttcttcctttgagcctgggagaatgggggaaggaccagtaggagagcccccacctctccagccgcctgctctgcggctccatgattttctagtgacactgagaggtagccccgactgggagccaatgctagggctgctaggggatatgctggcactgctgggacaggagcagactccccgagatttcctggtgcaccaggcaggggtgctgggtggacttgtggaggtgctgctgggagccttagttcctgggggcccccctaccccaactcggcccccatgcacccgtgatgggccgtctgactgtgtcctggctgctgactggttgccttctctgctgctgttgttagagggcacacgctggcaagctctggtgcaggtgcagcccagtgtggaccccaccaatgccacaggcctcgatgggagggaggcagctcctcactttttgcagggtctgttgggtttgcttaccccaacaggggagctaggctccaaggaggctctttggggcggtctgctacgcacagtgggggcccccctctatgctgcctttcaggaggggctgctccgtgtcactcactccctgcaggatgaggtcttctccattttggggcagccagagcctgataccaatgggcagtgccagggagttttcttccttactctttccctcctaggtaaccttcaacagctgctcttatggggcgtccggcacaacctttcctgggatgtccaggcgctgggctttctgtctggatcaccacccccaccccctgccctccttcactgcctgagcacgggcgtgcctctgcccagagcttctcagccgtcagcccacatcagcccacgccaacggcgagccatcactgtggaggccctctgtgagaaccacttaggcccagcaccaccctacagcatttccaacttctccatccacttgctctgccagcacaccaagcctgccactccacagccccatcccagcaccactgccatctgccagacagctgtgtggtatgcagtgtcctgggcaccaggtgcccaaggctggctacaggcctgccacgaccagtttcctgatgagtttttggatgcgatctgcagtaacctctccttttcagccctgtctggctccaaccgccgcctggtgaagcggctctgtgctggcctgctcccaccccctaccagctgccctgaaggcctgccccctgttcccctcaccccagacatcttttggggctgcttcttggagaatgagactctgtgggctgagcgactgtgtggggaggcaagtctacaggctgtgccccccagcaaccaggcttgggtccagcatgtgtgccagggccccaccccagatgtcactgcctccccaccatgccacattggaccctgtggggaacgctgcccggatgggggcagcttcctggtgatggtctgtgccaatgacaccatgtatgaggtcctggtgcccttctggccttggctagcaggccaatgcaggataagtcgtgggggcaatgacacttgcttcctagaagggctgctgggcccccttctgccctctctgccaccactgggaccatccccactctgtctgacccctggccccttcctccttggcatgctatcccagttgccacgctgtcagtcctctgtcccagctcttgctcaccccacacgcctacactatctcctccgcctgctgaccttcctcttgggtccaggggctgggggcgctgaggcccaggggatgctgggtcgggccctactgctctccagtctcccagacaactgctccttctgggatgcctttcgcccagagggccggcgcagtgtgctacggacgattggggaatacctggaacaagatgaggagcagccaaccccatcaggctttgaacccactgtcaaccccagctctggtataagcaagatggagctgctggcctgctttagtcctgtgctgtgggatctgctccagagggaaaagagtgtttgggccctgcagattctagtgcaggcgtacctgcatatgcccccagaaaacctccagcagctggtgctttcagcagagagggaggctgcacagggcttcctgacactcatgctgcaggggaagctgcaggggaagctgcaggtaccaccatccgaggagcaggccctgggtcgcctgacagccctgctgctccagcggtacccacgcctcacctcccagctcttcattgacctgtcaccactcatccctttcttggctgtctctgacctgatgcgcttcccaccatccctgttagccaacgacagtgtacagcagggctacagagggtcagaggaaaacagtttggaggaagacaaagggttaagacccatgactcctcgcagcctggctgccatccgggattacagcccaggaatgaggcctgaacagaaggaggctctggcaaagcgactgctggcccctgaactgtttggggaagtgcctgcctggccccaggagctgctgtgggcagtgctgcccctgctcccccacctccctctggagaactttttgcagctcagccctcaccagatccaggccctggaggatagctggccagcagcaggtctggggccagggcatgcccgccatgtgctgcgcagcctggtaaaccagagtgtccaggatggtgaggagcaggtacgcaggcttgggcccctcgcctgtttcctgagccctgaggagctgcagagcctagtgcccctgagtgatccaacggggccagtagaacgggggctgctggaatgtgcagccaatgggaccctcagcccagaaggacgggtggcatatgaacttctgggtgtgttgcgctcatctggaggagcggtgctgagcccccgggagctgcgggtctgggcccctctcttctctcagctgggcctccgcttccttcaggagctgtcagagccccagcttagagccatgcttcctgtcctgcagggaactagtgttacacctgctcaggctgtcctgctgcttggacggctccttcctaggcacgatctatccctggaggaactctgctccttgcaccttctgctaccaggcctcagcccccagacactccaggccatccctaggcgagtcctggtcggggcttgttcctgcctggcccctgaactgtcacgcctctcagcctgccagaccgcagcactgctgcagacctttcgggttaaagatggtgttaaaaatatgggtacaacaggtgctggtccagctgtgtgtatccctggtcagcagcctattcccaccacctggccagactgcctgcttcccctgctcccattaaagctgctacaactggattccttggctcttctggcaaatcgaagacgctactgggagctgccctggtctgagcagcaggcacagtttctctggaagaagatgcaagtacccaccaaccttaccctcaggaatctgcaggctctgggcaccctggcaggaggcatgtcctgtgagtttctgcagcagatcaactccatggtagacttccttgaagtggtgcacatgatctatcagctgcccactagagttcgagggagcctgagggcctgtatctgggcagagctacagcggaggatggcaatgccagaaccagaatggacaactgtagggccagaactgaacgggctggatagcaagctactcctggacttaccgatccagttgatggacagactatccaatgaatccattatgttggtggtggagctggtgcaaagagctccagagcagctgctggcactgacccccctccaccaggcagccctggcagagagggcactacaaaacctggctccaaaggagactccagtctcaggggaagtgctggagaccttaggccctttggttggattcctggggacagagagcacacgacagatccccctacagatcctgctgtcccatctcagtcagctgcaaggcttctgcctaggagagacatttgccacagagctgggatggctgctattgcaggagtctgttcttgggaaaccagagttgtggagccaggatgaagtagagcaagctggacgcctagtattcactctgtctactgaggcaatttccttgatccccagggaggccttgggtccagagaccctggagcggcttctagaaaagcagcagagctgggagcagagcagagttggacagctgtgtagggagccacagcttgctgccaagaaagcagccctggtagcaggggtggtgcgaccagctgctgaggatcttccagaacctgtgccaaattgtgcagatgtacgagggacattcccagcagcctggtctgcaacccagattgcagagatggagctctcagactttgaggactgcctgacattatttgcaggagacccaggacttgggcctgaggaactgcgggcagccatgggcaaagcaaaacagttgtggggtcccccccggggatttcgtcctgagcagatcctgcagcttggtaggctcttaataggtctaggagatcgggaactacaggagctgatcctagtggactggggagtgctgagcaccctggggcagatagatggctggagcaccactcagctccgcattgtggtctccagtttcctacggcagagtggtcggcatgtgagccacctggacttcgttcatctgacagcgctgggttatactctctgtggactgcggccagaggagctccagcacatcagcagttgggagttcagccaagcagctctcttcctcggcaccctgcatctccagtgctctgaggaacaactggaggttctggcccacctacttgtactgcctggtgggtttggcccaatcagtaactgggggcctgagatcttcactgaaattggcaccatagcagctgggatcccagacctggctctttcagcactgctgcggggacagatccagggcgttactcctcttgccatttctgtcatccctcctcctaaatttgctgtggtgtttagtcccatccaactatctagtctcaccagtgctcaggctgtggctgtcactcctgagcaaatggcctttctgagtcctgagcagcgacgagcagttgcatgggcccaacatgagggaaaggagagcccagaacagcaaggtcgaagtacagcctggggcctccaggactggtcacgaccttcctggtccctggtattgactatcagcttccttggccacctgctatga

SEQ ID NO: 36 - DNA, 5433 bp, synthetic construct
  misc_feature 1..5433: note = stereocilin codon optimized
  source 1..5433: mol_type = other DNA
atggctctgtctctgtggcctctgctgctgctcctgttgctgcttctgctgctcagcttcgccgtgacactggctccaacaggaccccactctctggatcctggcctgagctttctgaagtccctgctgagcaccctggatcaggctcctcagggcagcctgagcagatccagattcttcaccttcctggccaacatcagcagcagcttcgagcctggcagaatgggagaaggacctgtgggagaacctcctccactgcaacctccagctctgcggctgcacgattttctggtcacactgagaggcagccccgactgggaacctatgctgggactgctgggagatatgctggccctgctcggacaagagcagacccctagagatttcctggtgcatcaggctggcgtgctcggaggactggttgaagttctgcttggagcactggtgcctggcggacctcctacacctacaagacctccatgcaccagagatggccccagcgattgtgtgctggctgctgattggctgcctagcctgctcctgcttctggaaggcacaagatggcaggccctggtgcaggttcagccttctgtggatcctaccaatgccaccggcctggatggaagagaagccgctccacactttctgcagggactgcttggactgctcacacctactggcgagctgggctctaaagaagccctttggggaggcctgctgagaacagttggagcccctctgtacgccgcctttcaagagggactcctgagagtgacacacagcctgcaggacgaggtgttcagcatcctgggacagccagagcctgacaccaatggacagtgtcagggcgtgttctttctgaccctgagcctgctgggcaacctgcagcaactgcttctgtggggcgtcagacacaacctgagctgggatgtgcaggcactgggctttctgtctggaagccctccacctccaccagcactgctgcattgtctgtctactggcgtgccactgcctagagcctctcagcctagcgctcacatcagccccagacagagaagggccatcaccgtggaagctctgtgcgagaatcacctgggacctgctcctccatacagcatcagcaacttctccatccatctgctgtgtcagcacaccaagcctgccacacctcagcctcatcctagcaccacagccatctgtcagaccgccgtttggtacgccgtttcttgggctcctggtgctcaaggatggctgcaggcctgtcacgatcagttccccgacgagttcctggacgccatctgcagcaatctgagcttctctgccctgtccggcagcaatcggagactggtcaaaagactgtgcgccggactgctgcctcctccaacatcttgtcctgagggactgcctcctgtgcctctgactcccgatatcttttggggctgcttcctggaaaacgagacactgtgggccgagagactgtgtggcgaagcctctctgcaagccgtgcctccatctaatcaggcctgggtgcagcacgtttgtcagggccctacacctgacgtgacagcctctcctccttgtcacatcggaccttgcggcgagagatgtcctgatggcggcagctttctcgtgatggtctgcgccaacgacactatgtacgaggtgctggtgcccttctggccttggctggctggccagtgtagaatctccagaggcggcaacgatacctgtttcctggaaggactcctgggaccactgcttccatctctgcctccgcttggaccctctcctctgtgtcttacccctggacctttcctgctggggatgctgtctcagctgcctagatgccagtctagcgtgccagctctggcccatccaaccagactgcactatctgttgcggctgctgaccttcctccttggacctggcgctggcggagctgaagctcaaggcatgcttggcagagccctgctgctgtcatccctgcctgacaactgcagcttctgggacgccttcagacctgaaggacgcagaagcgtgctgaggaccatcggcgagtacctggaacaggatgaggaacagcctacaccaagcggcttcgaacccaccgtgaatcctagcagcggcatctccaagatggaactgctggcctgcttcagccccgtgctgtgggatctgctgcagagggaaaaaagcgtgtgggccctgcagatcctggtccaggcctatctgcacatgcctccagagaacctgcaacagctggtgctgtctgccgagagagaagctgcccagggattcctgactctgatgctgcagggaaagctgcagggcaaactccaggtgccacctagcgaagaacaggcccttggcagactgacagcactcctgctccagagataccccagactgacctctcagctgtttatcgatctgagccctctgatcccattcctggccgtgtccgacctgatgagattccctcctagtctgctggccaacgactccgtgcagcagggatacagaggcagcgaggaaaacagcctggaagaggacaaaggcctgcggcctatgacacctagatctctggccgccatccgggattacagccctggaatgaggcccgagcagaaagaggccctggctaagagactgctggctcccgagctgtttggcgaagttccagcctggcctcaagaactgctgtgggctgttctgcccctgctgccacatctgcctctggaaaacttcctgcagctgagcccacaccagattcaggccctcgaggattcttggcctgccgctggactcggacctggacatgctagacacgtgctgagaagcctggtcaaccagagcgttcaggacggcgaggaacaagtgcggagacttggacccctggcctgttttctgagccccgaggaactgcagagtctggtgcctctgtctgaccctacaggccctgttgaaaggggcctgctggaatgtgccgccaatggaacactgagccctgagggcagagtggcctatgaacttctgggagtgctgagatctagcggcggagccgttctgtcccctagggaacttagagtgtgggcacccctgtttagccagctgggcctgagattcctgcaagagctgtctgagccacagctgagggctatgctgcctgtgctccagggcacatctgtgacaccagctcaagccgtcctgctgttgggcagactgctccctagacacgatctgtccctggaagaactgtgcagcctgcacttgctgctgcctggactgtctcctcagacactgcaggccattcctcggagagtgcttgtgggagcctgtagctgtctggcccctgagctgtctagactgagcgcctgtcaaacagccgctctcctgcagaccttcagagtgaaggatggcgtgaagaacatgggcaccacaggcgctggacctgccgtgtgtattcctggacagcagcccattcctaccacctggccagattgtctgctcccactgctgcccctgaaactgctgcagctggattctctggctctgctggctaaccggcggagatattgggaactgccttggagcgaacagcaggcacagttcctgtggaagaagatgcaggtccccaccaatctgacactgcggaatctgcaggctctcggcacacttgctggcggaatgagctgcgagttcctccagcagatcaacagcatggtggactttctggaagtggtgcacatgatctaccagctgccaaccagagtgcggggaagcctgagagcttgtatttgggctgaactgcagcggcggatggccatgcctgaacctgaatggacaacagtgggccccgagctgaacggcctggactctaaacttctgctggatctccccatccagctgatggacagactgagcaacgagagcatcatgctggtggtggaactggtgcagagagccccagaacagctgctggcactgacacctctgcatcaagctgctctggccgaacgggcccttcagaatctggctcccaaagaaacccctgtgtccggggaagtgctggaaacactgggacctcttgtgggcttcctgggcaccgagtctaccagacagattcctctccagatcctgctgtcccacctgagccagctccagggattttgtctgggcgagacattcgccaccgaactcggatggttgctgctccaagagagcgtgctgggaaagcccgaactgtggtcacaggacgaagtggaacaggccggcagactggtgtttaccctgtctaccgaggccatcagtctgatccccagagaagcactgggccctgaaacactcgagaggctgctggaaaagcagcagtcttgggaacagagcagagtgggccagctgtgtagagaacctcagctggccgctaaaaaggccgcactggttgctggcgttgtcagacctgctgccgaggatctgccagagccagtgcctaattgtgccgatgtgcggggcacatttcctgccgcttggagcgctacacagatcgccgaaatggaactgagcgacttcgaggactgtctgactctgtttgccggcgatcctggactgggaccagaagaactgagagccgccatgggcaaagccaagcaactttggggacctccaagaggcttcagacccgaacagattctgcagctcggccgcctgcttatcggactgggcgatagagagctgcaagaactgatcctggtggactggggcgtgctgtctactctgggacaaatcgacggctggtccaccacacagctgcggattgtggtgtccagcttcctgaggcagtctggcagacatgtgtctcacctggacttcgtgcacctgactgccctgggctacacactgtgtggactgcggcctgaggaacttcagcacatcagctcttgggagttcagccaggcagccctgtttctgggaaccctgcatctgcagtgctccgaagaacaactggaagtgctcgcccatctgctcgtgctgccaggcggatttggccccatctctaattggggacccgagatcttcaccgagatcggcaccattgccgctggcatccctgatctggccctgtctgcactgctgagaggacagatccagggcgtgacaccactggccattagcgtgatccctccaccaaagttcgccgtggtgtttagccccattcagctgtccagcctgacatctgcccaagccgtggctgtgacccctgaacagatggcatttctgtctcccgagcagcggagagctgttgcttgggctcaacacgagggcaaagagagtcctgagcaacagggaagaagcaccgcttggggactgcaggattggtccagaccttcttggtcactggtgctgaccatcagctttctgggccacctcctgtga

SEQ ID NO: 37 - DNA, 19238 bp, Homo sapiens
  source 1..19238: mol_type = other DNA
gccctgccctcacctggctatcccacacaggtgagaataaccagaactcacctccggtaccagtgttcacttggaaacatggctctcagcctctggcccctgctgctgctgctgctgctgctgctgctgctgtcctttgcaggtaagaagaacagtgagcagaactggggatgaggaggagggtggctggaaaaagactttaagaatatggaggtgaacctgttagatagaaggacaaaggagagaggcagagacttgtgcaaaagggaaaaatgagggttaagaaaagcaggccaagacttactgtaggccagtgaaaggggttcagctcaccatcccctcacctcatctttagatccaggtagggaactgtgctcaggggcagggttgagtttgggctctgtgttcctctccttcagtgacctctggtttctctccttacagtgactctggcccctactgggcctcattccctggaccctggtctctccttcctgaagtcattgctctccactctggaccaggctccccagggctccctgagccgctcacggttctttacattcctggccaacatttcttcttcctttgagcctgggagaatgggggaaggaccagtaggagagcccccacctctccagccgcctgctctgcggctccatgattttctagtgacactgagaggtagccccgactgggagccaatgctagggctgctaggggatatgctggcactgctgggacaggagcagactccccgagatttcctggtgcaccaggcaggggtgctgggtggacttgtggaggtgctgctgggagccttagttcctgggggcccccctaccccaactcggcccccatgcacccgtgatgggccgtctgactgtgtcctggctgctgactggttgccttctctgctgctgttgttagagggcacacgctggcaagctctggtgcaggtgcagcccagtgtggaccccaccaatgccacaggcctcgatgggagggaggcagctcctcactttttgcagggtctgttgggtttgcttaccccaacaggggagctaggctccaaggaggctctttggggcggtctgctacgcacagtgggggcccccctctatgctgcctttcaggaggggctgctccgtgtcactcactccctgcaggatgaggtcttctccattttggggcagccagagcctgataccaatgggcagtgccagggaggtgagtgtggccagggctgggactgggatgtggcagggcaaggaaagtgaaattggggtagttttcttccttactctttccctcctaggtaaccttcaacagctgctcttatggtaagtaacaggagaccagttctgagggattgggcctggaaaatctggaggtgaagagctgaagacctcagcctctagagaggaaaactgatgggaggagtgtagtttagtggttttggggtgtgactgtctgggttggtgtcccagctccacctcttcctagccatatgaccttgagcaggttacatagtctttctatacctcagtttccccatttataaaatgagaatgataatattagttaccacagagttgttgcacccggttaaatgagttgatactgtgtatgcaaacgacttaaaaccgtgctggcacatagcgcttaataatgttagctagtaaagatgggatttggaaaataaggacacagctggattcctctacccccttactacttcagtacaacaatgccagacagtagttagacatattgagttgctgagcagatttcctaacatgaggcccgctgagggttgtgtttaagctatctaaaagcatacgaagaaaggagacagaagggggccaggtggacagaaagaattccaactggggcttctcctaggtgattttggaccttggcagggcagctttctcttttttgccccgttgcagcatttcaaccagtaacgcctaaactctcagggacctcgcttgtagaaaagcctatgcttgccatgccccttgagggctctgagtcagggtcagaatcttcagctggaggaaatgtgaactgaccagatcctgcctgctcctccctctgcacccaggggcgtccggcacaacctttcctgggatgtccaggcgctgggctttctgtctggatcaccacccccaccccctgccctccttcactgcctgagcacgggcgtgcctctgcccagagcttctcagccgtcagcccacatcagcccacgccaacggcgagccatcactgtggaggccctctgtgagaaccacttaggcccagcaccaccctacagcatttccaacttctccatccacttgctctgccagcacaccaagcctgccactccacagccccatcccagcaccactgccatctgccagacagctgtgtggtatgcagtgtcctgggcaccaggtgcccaaggctggctacaggcctgccacgaccagtttcctgatgagtttttggatgcgatctgcagtaacctctccttttcagccctgtctggctccaaccgccgcctggtgaagcggctctgtgctggcctgctcccaccccctaccagctgccctgaaggcctgccccctgttcccctcaccccagacatcttttggggctgcttcttggagaatgagactctgtgggctgagcgactgtgtggggaggcaagtctacaggctgtgccccccagcaaccaggcttgggtccagcatgtgtgccagggccccaccccagatgtcactgcctccccaccatgccacattggaccctgtggggaacgctgcccggatgggggcagcttcctggtgatggtctgtgccaatgacaccatgtatgaggtcctggtgcccttctggccttggctagcaggccaatgcaggataagtcgtgggggcaatgacacttgcttcctagaagggctgctgggcccccttctgccctctctgccaccactgggaccatccccactctgtctgacccctggccccttcctccttggcatgctatcccagttgccacgctgtcagtcctctgtcccagctcttgctcaccccacacgcctacactatctcctccgcctgctgaccttcctcttgggtccaggggctgggggcgctgaggcccaggggatgctgggtcgggccctactgctctccagtctcccagacaactgctccttctgggatgcctttcgcccagagggccggcgcagtgtgctacggacgattggggaatacctggaacaagatgaggagcagccaaccccatcaggctttgaacccactgtcaaccccagctctggtataagcaagatggagctgctggcctgctttagtgtgagtgctctgccagagggaaagctcctagaacagtgagaaggccctccaggggaattcctcgaatactcagaggcagtagtgtggggtagtagttgaagcacacagctctagagtcagacaggcttggattcatatcttggttctgtgaccagccttgaatgagttatttaacttctctgagcaatatttttctcgtctcatttataaactagggatgataatggtatatgagataatacatgctgtgggcttagcacagtgcatgatacacaaacatgcaataaatattaccttgttattcttttgggctctttgactctctcactttctgcaccagaaagaaaaaggatcaagttagaggactctaaatttttcccctagagagtgagaattggaggctggcagaatacaggaagataaggtaggaatgagaaagattcagggacactaccaatcagaagactttggttctaggttcaactgtgccacaaattagtgtgatcttaggcaagcaatttcatttagtttttctgggcttcagtttttagtctgtagaatggaggggtgagaatatgttaaacaccataattaattcactgagtgcctattatatgcaaggcactttgctaggttctgtaggatatataaagatttcttactccatgttggggccacctttttcaaaccctgggcccagtaaaatggaattagatagtctcatagtatttggttcaggtctacaagtattaattgagccaactatggacctggcatgggagagggtacaagagaaattagagatatgatcccggacctaaaagagcttaatatctgaagaatcacacttgagatgatggacaagcatcccagcaagtggagctggaatgcctgggggagctgcaggagagacagagaagacagctctgttggcatattgtctttcttcccaccagcctgtgctgtgggatctgctccagagggaaaagagtgtttgggccctgcagattctagtgcaggtaacaggtggagggcacatgggtgggctgggtgacagccatggctggaggtccctgccccgtgaggtgaggccatacccaccatgacctcctattcgcaggcgtacctgcatatgcccccagaaaacctccagcagctggtgctttcagcagagagggaggctgcacagggcttcctgacactcatgctgcaggggaagctgcaggggaagctgcaggtgagcactgagaaaggggagcaagggcacctggagcctagtgttcagagggcttgctttagtgggaggaggaactccagagaggaaatggcagggatactgagcatctccagaggcagaatccattcctgtgcccctacaggtaccaccatccgaggagcaggccctgggtcgcctgacagccctgctgctccagcggtacccacgcctcacctcccagctcttcattgacctgtcaccactcatccctttcttggctgtctctgacctgatgcgcttcccaccatccctgttagccaacgacagtgtgtaaggttcttgcactactcctcctgctcctgtcacggtcaggccaaccgcatccacctggagcagccccttccggagctcctctctgtttttttctttcatgccagataggcaatgtgccaacatcgtagcaaggtttgagagaggcacatctcacgcctgagtgtgaaaacccaatcattatgctaatgaactacaaaaggatcagagagctcctctctattaaaaccagggagaggatgggcgtggtggctcatgcctgtaatcccagcacgttgggagcccgaggcaggtggatcactaggtccgcctagtgagttcgagaccagcctggccaatatggtgaaaccccgtctctattaaactacaaaaattagccaggcatggtggtgggcgcttgtagtcccagttactctggaggctgaggcaggaggatagcttgaacctgggaggcagaggttgcagtgaaccaagatcgtgccactgcactccagcctgggtgacagagcgagactccgtcttaaaaaaaacaaaaaacaaaacaaaacaaaaaaacagggagagtctccttcctatctagacagcagggctacagagggtcagaggaaaacagtttggaggaagacaaagggttaagacccatgactcctcgcagcctggctgccatccgggattacagcccaggaatgaggcctgaacagaaggaggctctggcaaagcgactgctggcccctgaactgtttggggaagtgcctgcctggccccaggagctgctgtgggcagtgctgcccctgctcccccacctccctctggagaactttttgcagctcagccctcaccaggtatgagaatcatcttctttacttgactggcccatcttctgctagtggggacaaagagtcaatggcatgtctctcagtggcccctccctgcaagaaccctatagtgaccccagtgcgagctaaccttccccatctcagatccaggccctggaggatagctggccagcagcaggtctggggccagggcatgcccgccatgtgctgcgcagcctggtaaaccagagtgtccaggatggtgaggagcaggtacgcaggtgagttgttgtgggatcagtaaccaaggcaagagtggaagaggtagagagaggaaggcacagctgtcacgctgggtcggtgttctaggaagaaaggggcaagagagtaggcagtggcctcaggcagcatagagttccaggagagaggtctatagatggtgcccctgtgtagtggtgtagtgtcagagtgcccagtgtatgtacccataccatctgctgccaggcctgccttagtgctagtcttggggaccacacaaaggtcagcttcatgccctcctcaggcttgggcccctcgcctgtttcctgagccctgaggagctgcagagcctagtgcccctgagtgatccaacggggccagtagaacgggggctgctggaatgtgcagccaatgggaccctcagcccagaaggacgggtgagcccctcagcacaagcctacaagactttaggcttcccctgggtctgtgtggatggctttcccattgtgtcaacttgagcacagtggtgccagcccccatcccacttttgcaacctccattccttactccatggccattcttacctgttaccacctcttcctggcccttctctatctggtctgtagcaccccaaacataccctttgccattttgaacctaatctactccagtccaatccctagttccaaaccctagcccaggccctgggaaattcagatgtgggattagagaggaagttcaaggttcatctgtcttttctctccagtcctaaaccttctttggttacaggtggcatatgaacttctgggtgtgttgcgctcatctggaggagcggtgctgagcccccgggagctgcgggtctgggcccctctcttctctcagctgggcctccgcttccttcaggagctgtcagagccccagcttagagccatgcttcctgtcctgcagggaactagtgttacacctgctcaggtttgcctgtctcactccctggcatgtaccctccatccccgcttgagccccagtcaagagaatcccattcagggataaaagcagcccctcctttccctgggtgaacagtagaggtaaactctgtctgcaggaggacgccttcattccctttcctcagatcaagaagggacctgagtcactgaggatggttactagggatggttaagaggcagcgggaagttttggagggtttgccttaggaacccacttaggacctggctgctgggtcctgagagctgttgttttcggtcccatcccaacacaggctgtcctgctgcttggacggctccttcctaggcacgatgtgagtagcagcaacttctcagcctcccgccagaggtctctatcctcttttaacctggctcctgcatctgcccctcctctctctccgctcccctcatacttactgccttgctgcattgtgattgttgtcttccccaacacccttcccttcttcttcaggcctcttgtctctcttgctctttagctatccctggaggaactctgctccttgcaccttctgctaccaggcctcagcccccagacactccaggccatccctaggcgagtcctggtcggggcttgttcctgcctggcccctgaactgtcacgcctctcagcctgccagaccgcagcactgctgcagacctttcgggtatgagagtggcaaggaggatgagataatcagggataccggctctttctggttgggaggaaggcatcttccctgaggccagggaaggcctttcatacctccccacttacacacacacacacacacacacacacacacacacacacaaccaattctcatgcaggttaaagatggtgttaaaaatatgggtacaacaggtgctggtccagctgtgtgtatccctggtcaggtaagtgtgagatctcccaactgagctcctctccccattctggggcagtttcatatggctggtgctacctcccacactaccctgcagtggccctgagagttctggttagctctgtgcccattagcagccctccccagtgccagatgcaggacagcatgatccactcacattgtcctagactaatgtcaaagctggaagggcctgagaaatcttccaggccacccaccctgctttcagatgaaaagaccaaggctgggagaagctaagggactttgtttgcctggtgcctaactagcagcaacacttgaccacagcagcctgcagtgtgaggctcttaggcgtttattgctacagtggcaaatgccattccacttctgtcctagctttggtccctttccacccccatggttccttttctctgagtgctaagtacagactctctcacctatcactacactgctatacccatcaccgccagcagcctattcccaccacctggccagactgcctgcttcccctgctcccattaaagctgctacaactggattccttggctcttctggcaaatcgaagacgctactgggagctgccctggtctgagcagcaggtaattctccccacttaatttcagaacttcctccctcaatgtagtctaccttctttacctatcccttagccctatttggccagcttatccctactatcctttatttgattgtttgagatacagtctcactctgttgcccaggctgcagtgcagtggcatgatcagagttcgctgtaacctcaaactcctgagctcaggcaatctttctgcctcagcctcctgaatagctaggacgacaggtggttaccaccatgcctggctaatttttaaattttttttttgttttttgagatgaagtcttgctctgtcacccaggcttgagtacagtggcacaagcttggctcactgcaacctctgtctcccgggttcaagcgattctcctgcctcagcctcccgagtagctgggactacaggcactccccacaatgcctggctaattttttttttgttttagtagagacagggtttcaccatattggccaggctggtctcgaactgctgaccttgtgatctgcctgcctctgcctctcaaagtgctgggattacaggtgtgagccaccatgcccggccaatttttaaattttttgtagagacagacaatacaaaaatgtggacactatgtggagacactatgttgaggtactatgctgtccagattggtcttgaactcctggcctcaagcaatcctcctgccttggcctcccaaagtgctgggattacagacctgagccactgcacccagccccctagtatctcttataatgtgacttgcttttctttttctttctccttcccttttctttcatttctttctcactctcgagagaagagtgggcatctgggagagtgggaggctggtgggtcccacagagtgaggaggcaggactgggtccaaggcagtcctgcctctccactctagggggtatccttggacagtgtctcttctgggaaggggctcgtctttctttctcttgtaggcacagtttctctggaagaagatgcaagtacccaccaaccttaccctcaggaatctgcagtgagtaacttgtgttgagcagtgcgctgaattcgaccaacatttttttgagtgcttactatgtgccaggcaccatgtgatatggaatgggggatatagggatgaatgatgcatagtccctgcctcgtggacgttctcctagcacctccctttgccctcctttccttccacagtgccatgcctatcctgactagagccaaaggactcagaaaacctggattcaggttccagtcctgtcacctacttgtcctcttgggcaagtcatttaacgtccctgtgtcagttttcccttctttaaatgagaattacaatggcaccagcctcataggtagttactgtgaagattaaatgaggtaggtcatgtaagatatttaacacagtgtttggtccattgtaaagtcccagtagtcatttgctactgttagtttacttcaggatgacttcagaggcactggccaagcaagaataaataggaataagaaggtatcactttacttacacccacattagaagaacaatgggcttcagaatctttttttttttttttttttcgagacagtcttgctctgttgcccaggctggagtgcagtggcgcgatttcggctcactgcaacctctgcctcccaggttcaagcgattctcctgtctcagcctctggagtagctgggattacaggaatgtgccaccatacccagctaatttttgtatttttagtagagatggggtttcaccattttggccaggctggtctcaaactcctgacctcaggtgatccacccgcctcagcctcccaagggcttcagaatctaagacatggctctagtttcagtttaccacatttctagcagaatgatgttgggaatgtcacctgacttccataaatccttattttctcctctgataaacagcagtgatgttatggggagctgatgagatatctatgtaaaaacatttctcaaaccataaattacggtggatgaacatctgtacttgtgttgagagtactgatatcaaggagcaaacaggctgttgtatgtgttgaatgagcctctccccactcacacacccacagggctctgggcaccctggcaggaggcatgtcctgtgagtttctgcagcagatcaactccatggtagacttccttgaagtggtgcacatgatctatcagctgcccactagagttcgagggagcctggtgagagggggtgcctggactttagtgggagcagggaggctgggaccctaggtatagaacccagctcctatgttctgctctggcctcacactgcttccctacagagggcctgtatctgggcagagctacagcggaggatggcaatgccagaaccagaatggacaactgtagggccagaactgaacgggctggatagcaagctactcctggacttaccgtaagtactgcagctagagatattggcccctcagaaagctcaatctggggtgaagatctgcccttagggaatgccctggaggaggtagtttttctgtctggtagttccctgacataatttatagcccaaagcagaggattttattcaaagttgctctatgtattgactggttcccagaatatgctccagcacagggcagctgagggtggcaacactgtattgaagcctgccaagtaatcttacaataacctagtccacattaattgagattgagacagagcatctgaagtgagggaggcaatgctccaaatctgccccagaggattgtagtttgctcagggcactgtgttcttagtgcattcagaggagtagatcgagagaaaaatatatgaaaaatgtgataaataccttcaaatacctgaggggctatcaagtagaaattagattgtcatatttatgagtggccccattgggcaagactaagagtagttaacggagatcagatttttacatagtataagaaaaactaaggtagtgagttcctggtccttggagctgttcgagcctaagccagatggccccatggcaggaatgttgtagagcacgttcatatacaggttgtgggaagaaaaggctataggaacccaaggctcctccctacccatggagaaatttattagtatgttactcatatgctgcttttctcattttacccctaccaccaccccgttgccatccgcactgtaagtcaggataggaaaatgctggtgttacagtcttcctggggaatatggagctgaagtggagtaaaagcagttgacttcattcctacttttttcttttttttctttttttttttttttgagacagagttttgctgtgtcaccaaggctggagtgcagtgacgtgatctcggctcactgcaacctccatcttccaggttcaagcaattctcctgcctcagtctcccgagtagctgggactgtaggtgtgcaccaccatgccaggctaatttttgtatttgttgtagggacgagctttcaccatgttggccaggctggtcttgaactcctggcttcaagtgatctgcccacctcggcttcccaacattcttatatttttataggcctttccacagatttcagctcttgtatgacttagcccagttccagaactggtaatcctaggtagggtacaggttatcacctctgatttcgggtaaaagggatttatttatttatttgtttatttatttatatttttgagacagagtctcgctctgtcacccaggctggagtgcaatggtgccatctcggctcactgcaacctctccctctggggttcaagcaattctcctgcctcagcctgctgagtagctgggattacaggcgcgtgccaccacacccggctaatttttgcatttttagtagagacggggtttcaccatgttgctcagggtggtctcgaatttctgaccctgtgatctgcctgcctcggcctcccaaagtgctgggattacaggcatgagccactgcgtccggcctgtttttacttttttttaatgccattcagatctgtttaaatatgtgggttctgtgagataatttagaatcccaaggttacagatgaggtgaaagatcctagaccatgcatcaaaaaacttgagtttctcatttgtgaaagaaggataagagaaacacctattttgtctgggtgcagtggctcatgcctataatcccagcatttggggaggccaaggtgggtggatcacggaggtcaggtgttcaagaccagactggccaacatggcaaaacaccatctctactaaaaatacaaaagttagctgggcgtggtggcacgtgcgtgtaattccagctattcgggaggctgaggcacgagaattgcttgaacctgggaggtgcgggttgcagtgaactgagatcgcagcaccactgtgctccagcctgagtgatggagtgaggccaggtcttgttgtaggatcaaatgagataacacctgaaagaactttgtaaattgtatagcacgtacaaacaagaagggacctcttcacaagcagaggaagggtggtcctgtggaaaaaaacgggaattgggagtgagagacctcaacatttgatctctgtgaacctcagttttttaatctataaaatggggaaatgttaatggtacttaatatttggagcttttgagtccattagatcaggtaggattgttcgttattttttttttttaggaagactagaaatatgttgctccctttttctcccccactcaagcttgatggtgggaattggccctggagctgtttactatcagttcctgtccagcttcactaaatttggtctggggtcacatcttagctgcggactgtggggttttgtggtcccttctcgacttggcccagctccacctgaatcctgttgttgtcaaattgctgtaataggatccagttgatggacagactatccaatgaatccattatgttggtggtggagctggtgcaaagagctccagagcagctgctggcactgacccccctccaccaggcagccctggcagagagggcactacaaaacctggtaagagtccaccctaccagactcagatttgctgccctgggcaattcttgctcctcagacaatgctctctgactgtcccccaaccctctacttcttgctttcttgctgccaaacagattcctgtctacaaggcctggcccctgttttgcctctgggttctgttccttgataatatgcttcacgttacttgtccatacctcttggagtccgagaaatctcttggagtccacctctcagtctttctgcctgctcctatctgggctcattgcttaaggaagtgaacaaaggtagtgagcatcatagggtgctgagctgggagcaggagggagggaaggttagggggcttggtgtcttgatcaaggtgtctggtattctgagtcagaagtgcattgtccaagttctgatgctcttctccaggctccaaaggagactccagtctcaggggaagtgctggagaccttaggccctttggttggattcctggggacagagagcacacgacagatccccctacagatcctgctgtcccatctcagtcagctgcaaggcttctgcctaggagagacatttgccacagagctgggatggctgctattgcaggagtctgttcttgggtatggaccttcgagaacttcagattctaactcattctatacccagtccctcagccaccatcatcagtggcagcctgttccatattcttaaggtcccctggagccctgtgtccgaaatcctagcatgtcctcttttccccttccttttcctcacagttccctcagctccccagcccccgattttcttcctgtccccaggaaaccagagttgtggagccaggatgaagtagagcaagctggacgcctagtattcactctgtctactgaggcaatttccttgatccccagggtgagatgaaggaagaagggaagggagtaaatgcatagaggggactggtgagctggttatggggacccgtggccaaagagggcaaaggatatgaagcctagatctggggggagactgcaaaacagagacaggactttggacttagagctatagcagcaggtcctgatctgtccagatctccccactctccttctaccttctcatgcaggaggccttgggtccagagaccctggagcggcttctagaaaagcagcagagctgggagcagagcagagttggacagctgtgtagggagccacagcttgctgccaagaaagcagccctggtagcaggggtggtgcgaccagctgctgaggatcttccaggtgaaactacccaaatacttatatgtccagcaggatgtacagggagtatcaaacggtctgggttctacatgtgctcttccctgggactgggttttctaatttataaagcaaagagtttagagggatgatcttcaagcctcttgtagttctagaattctgtagttctgggagtttgtaaactattaagttttcttttagcccagaacttccattttcctgctctctcgtgtctgctctagactcagctctagctcggctaagtgtggagctctctgctggggagatccctagaagctttgaaggagacattgtgaggctggagaactgggttcaaattcagtgctaccattaaatctctgaataacatcctcagtcttccatctataaaagtcttggcatctccaatcacttcttgttctattatctcctaagccctatacatattactctgtaatactcctttgatccctatttctcacagtgctctatcctccaaaggttggaagactcactctatctacagatatctctctgggcatattttattactgcgctgacctcctggccctgccttcccccttcagaacctgtgccaaattgtgcagatgtacgagggacattcccagcagcctggtctgcaacccagattgcagagatggagctctcagactttgaggactgcctgacattatttgcaggagacccaggacttgggcctgaggaactgcgggcagccatgggcaaagcaaaacaggttagggatggagagccaactggggttggccatgaggaagctatttgggtgtgatgtaggacacaaagagaatggagagttggatgagaggtgggggaagcaagagatagaagagttagaagatttgggtcacaagtaggaggtgaagggagataaatattgaggaaagagagctagtataatgaatagagggacgaaagcagtggttaccaaattttaatgcatatcacgatcatcaagggaacagatttttttctttatttttttttctttcttaaaaaaataatggcatgcttcggctgggtgcagcggctcacgcctataatctcagaactttgggaggccaaggcgggcagatcacgaggtcaggagatcaagaccatcctgtctaacacggcgaaacacggtctctactaaaaatacaaaaaagttagccgggcatggtggtgcacacttgttgtcccagctacttgggaggctgaggcaggagaatggcgtgaacctgggagggggagcttgcagtgagccgaagtcaagccaatgcactccatcctgggtgacagagcaagactccatctcaaaaaaaaaaaaaaaaaaaaaaggcatgcttcatgaatttgcgtgttatccttgcacaggcgccatgcaaatctctgtatcattccaattttttggggtatgtgctgctgaactgagcatgggaacagtgccagtgccagattaccatgcttcactgacttaataaaaacctttggggaggctgggcgcagtgactcatgcctgtaatcacagcactttgggaggcggaggcaggtggattgcttgagcccaggagttagagaccagactgggcaacatggtgaaaccctgtctctactaaaaatagaaaaaacattagctgggtgtggcggcacatgcctgtaatcccagctactcaggaggctggggtaggagaatcccatgagtgcaggaggtggagggtgcaatgtgccaagatcgcaccactgccctccagcctgggtgtcagagcaagaccctgtctcataaattaaaaaataagcctctgggggaaagagtctagacatctgcatctcctttttttttttttttttttttttttgagacagagtctcactctgtcacccagcatccaggctggagtgcagtggtgtgatcttggctcactgtaacctctacatcctgggttcaaacgatcctcctgcctcagcctctcaagtagctgggactacaggtgcaccacacctggctaatttttgtatctttggtagagatggggtttcactatgttgcccaggatggtctcgaacttctgggctcaagcaatcctcccacctcagcctcccaaagtgctgggattacagctgttagccactgtgctgggccctaggcatctgttttaataagcgtctctgtgtctgatgcacataaaagtgtggaactcatggactagagttagtttgctcttcttttccactgattgtaatgtctttcaaaacaccttagaggaactgtaaggcaacggtctcattttatagtggaggaaactaaagaaaaggcaaatgatttacctagagttatacagctaagggcagaggcaagacttaaaacccagcagtatgactcccaatccactgcttttccactcacattgttcctgtctttctcctagttgtggggtcccccccggggatttcgtcctgagcagatcctgcagcttggtaggctcttaataggtctaggagatcgggaactacaggagctgatcctagtggactggggagtgctgagcaccctggggcagatagatggctggagcaccactcaggtaacacttttcctcctccctacggcttcccaaacacccatcccacagacccagccctatagatcatctaaagcccaaggaatttttttcctgtgaccctacctggtccttctttctatcttttgttgataccccatactagtgaccttcaggactctgatttattcactctgaggccctggacacataatactgtctcctacctcttttcctggaggcttcctctttttctttccttttcttttctgagtcctcagccttccccatgactccttaggtcttaatagtaacagaatataacccagtaacacctatcacttccctgtccattaattctccataactttcctccttcccctcttctcccaccccccaccccagctccgcattgtggtctccagtttcctacggcagagtggtcggcatgtgagccacctggacttcgttcatctgacagcgctgggttatactctctgtggactgcggccagaggagctccagcacatcagcagttgggagttcaggtcatttgtgaaggggctgagggtggtggtgctgaggtaaaggtggacttactggggaaagaaggatcatgaaggtctggtcccatggaggaagggaactcatttgaagccatctcttcctttgtctcatgaccacagcccctttcactgaagccgaattcttcttccttccttcctactgttctacagccaagcagctctcttcctcggcaccctgcatctccagtgctctgaggaacaactggaggttctggcccacctacttgtactgcctggtgggtttggcccaatcagtaactgggggcctgagatcttcactgaaattggcaccatagcaggtggggagctgggccactgctggtgcaagttggtttggtttctataccatgggtggactggatggaagactgccctgcaattcttaaggtgggggcctgagggtgtttaaataaggggctagagacatattggggaaggtctatgatagggcactttgggagtagttagagaaggtctataggtttgaagagagggaaggtcagtctaagacaatgtttggatgccacttgcttcaacagctgggatcccagacctggctctttcagcactgctgcggggacagatccagggcgttactcctcttgccatttctgtcatccctcctcctaaatttgctgtaagtattaatggactggggtgaccacaggagagccagggcccaatggggactacatgcatgcactgattcctacccctgccctcaggtggtgtttagtcccatccaactatctagtctcaccagtgctcaggctgtggctgtcactcctgagcaaatggcctttctgagtcctgagcagcgacgagcagttgcatgggcccaacatgagggaaaggagagcccagaacagcaaggtgagttcccagctgcacagcttgatcctccatctcctgacccagaatcaaacccctaatttggtgctgtctggctcttagagtgcacccagggagatccctggagtgaaggagtctacaggcagagcgctaatttccaagtatcaatgctcctggagagctgagttgtgatattactcccattccctgtctattataggtcgaagtacagcctggggcctccaggactggtcacgaccttcctggtccctggtattgactatcagcttccttggccacctgctatgagcctgtctctacagtagaaggagattgtggggagagaaatcttaagtcataatgaataaagtgcaaacagaagtgcatcctgattattttcagaagctgatgaggaata

SEQ ID NO: 38 - DNA, 18884 bp, Homo sapiens
  source 1..18884: mol_type = other DNA
gccctgccctcacctggctatcccacacaggtgagaataaccagaactcacctccggtaccagtgttcacttggaaacatggctctcagcctctggcccctgctgctgctgctgctgctgctgctgctgctgtcctttgcaggtaagaagaacagtgagcagaactggggatgaggaggagggtggctggaaaaagactttaagaatatggaggtgaacctgttagatagaaggacaaaggagagaggcagagacttgtgcaaaagggaaaaatgagggttaagaaaagcaggccaagacttactgtaggccagtgaaaggggttcagctcaccatcccctcacctcatctttagatccaggtagggaactgtgctcaggggcagggttgagtttgggctctgtgttcctctccttcagtgacctctggtttctctccttacagtgactctggcccctactgggcctcattccctggaccctggtctctccttcctgaagtcattgctctccactctggaccaggctccccagggctccctgagccgctcacggttctttacattcctggccaacatttcttcttcctttgagcctgggagaatgggggaaggaccagtaggagagcccccacctctccagccgcctgctctgcggctccatgattttctagtgacactgagaggtagccccgactgggagccaatgctagggctgctaggggatatgctggcactgctgggacaggagcagactccccgagatttcctggtgcaccaggcaggggtgctgggtggacttgtggaggtgctgctgggagccttagttcctgggggcccccctaccccaactcagcccccatgcacccgtgatgggccgtctgactgtgtcctggctgctgactggttgccttctctgctgctgttgttagagggcacacgctggcaagctctggtgcaggtgcagcccagtgtggaccccaccaatgccacaggcctcgatgggagggaggcagctcctcactttttgcagggtctgttgggtttgcttaccccaacaggggagctaggctccaaggaggctctttggggcggtctgctacgcacagtgggggcccccctctatgctgcctttcaggaggggctgctccgtgtcactcactccctgcaggatgaggtcttctccattttggggcagccagagcctgataccaatgggcagtgccagggaggtgagtgtggccagggctgggactgggatgtggcagggcaaggaaagtgaaattggggtagttttcttccttactctttccctcctaggtaaccttcaacagctgctcttatggtaagtaacaggagaccagttctgagggattgggcctggaaaatctggaggtgaagagctgaagacctcagcctctagagaggaaaactgatgggaggagtgtagtttagtggttttggggtgtgactgtctgggttggtgtcccagctccacctcttcctagccatatgaccttgagcaggttacatagtctttctatacctcagtttccccatttataaaatgagaatgataatattagttaccacagagttgttgcacccggttaaatgagttgatactgtgtatgcaaacgacttaaaaccgtgctggcacatagcgcttaataatgttagctagtaaagatgggatttggaaaataaggacacagctggattcctctacccccttactacttcagtacaacaatgccagacagtagttagacatattgagttgctgagcagatttcctaacatgaggcccgctgagggttgtgtttaagctatctaaaagcatatgaagaaaggagacagaagggggccaggtggacagaaagaattccaactggggcttctcctaggtgattttggaccttggcagggcagctttctcttttttgccccgttgcagcatttcaaccagtaacgcctaaactctcagggacctcgcttgtagaaaagcctatgcttgccatgccccttgagggctctgagtcagggtcagaatcttcagctggaggaaatgtgaactgaccagatcctgcctgctcctccctctgcacccaggggcgtccggcacaacctttcctgggatgtccaggcgctgggctttctgtctggatcaccacccccaccccctgccctccttcactgcctgagcacgggcgtgcctctgcccagagcttctcagccgtcagcccacatcagcccacgccaacggcgagccatcactgtggaggccctctgtgagaaccacttaggcccagcaccaccctacagcatttccaacttctccatccacttgctctgccagcacaccaagcctgccactccacagccccatcccagcaccactgccatctgccagacagctgtgtggtatgcagtgtcctgggcaccaggtgcccaaggctggctacaggcctgccacgaccagtttcctgatgagtttttggatgcgatctgcagtaacctctccttttcagccctgtctggctccaaccgccgcctggtgaagcggctctgtgctggcctgctcccaccccctaccagctgccctgaaggcctgccccctgttcccctcaccccagacatcttttggggctgcttcttggagaatgagactctgtgggctgagcgactgtgtggggaggcaagtctacaggctgtgccccccagcaaccaggcttgggtccagcatgtgtgccagggccccaccccagatgtcactgcctccccaccatgccacattggaccctgtggggaacgctgcccggatgggggcagcttcctggtgatggtctgtgccaatgacaccatgtatgaggtcctggtgcccttctggccttggctagcaggccaatgcaggataagtcgtgggggcaatgacacttgcttcctagaagggctgctgggcccccttctgccctctctgccaccactgggaccatccccactctgtctgacccctggccccttcctccttggcatgctatcccagttgccacgctgtcagtcctctgtcccagctcttgctcaccccacacgcctacactatctcctccgcctgctgaccttcctcttgggtccaggggctgggggcgctgaggcccaggggatgctgggtcgggccctactgctctccagtctcccagacaactgctccttctgggatgcctttcgcccagagggccggcgcagtgtgctacggacgattggggaatacctggaacaagatgaggagcagccaaccccatcaggctttgaacccactgtcaaccccagctctggtataagcaagatggagctgctggcctgctttagtgtgagtgctctgccagagggaaagctcctagaacagtgagaaggccctccaggggaattcctcgaatactcagaggcagtagtgtggggtagtagttgaagcacacagctctagagtcagacaggcttggattcatatcttggttctgtgaccagccttgaatgagttatttaacttctctgagcaatatttttctcgtctcatttataaactagggatgataatggtatatgagataatacatgctgtgggcttagcacagtgcatgatacacaaacatgcaataaatattaccttgttattcttttgggctctttgactctctcactttctgcaccagaaagaaaaaggatcaagttagaggactctaaatttttcccctagagagtgagaattggaggctggcagaatacaggaagataaggtaggaatgagaaagattcagggacactaccaatcagaagactttggttctaggttcaactgtgccacaaattagtgtgatcttaggcaagcaatttcatttagtttttctgggcttcagtttttagtctgtagaatggaggggtgagaatatgttaaacaccataattaattcactgagtgcctattatatgcaaggcactttgctaggttctgtaggatatataaagatttcttactccatgttggggccacctttttcaaaccctgggcccagtaaaatggaattagatagtctcatagtatttggttcaggtctacaagtattaattgagccaactatggacctggcatgggagagggtacaagagaaattagagatatgatcccggacctaaaagagcttaatatctgaagaatcacacttgagatgatggacaagcatcccagcaagtggagttggaatgcctgggggagctgcaggagagacagagaagacagctctgttggcatattgtctttcttcccaccagcctgtgctgtgggatctgctccagagggaaaagagtgtttgggccctgcagattctagtgcaggtaacaggtggagggcacatgggtgggctgggtgacagccatggctggaggtccctgccccgtgaggtgaggccatacccaccatgacctcctattcgcaggcgtacctgcatatgcccccagaaaacctccagcagctggtgctttcagcagagagggaggctgcacagggcttcctgacactcatgctgcaggggaagctgcaggggaagctgcaggtgagcactgagaaaggggagcaagggcacctggagcctagtgttcagagggcttgctttagtgggaggaggaactccagagaggaaatggcagggatactgagcatctccagaggcagaatccattcctgtgcccctacaggtaccaccatccgaggagcaggccctgggtcgcctgacagccctgctgctccagcggtacccacgcctcacctcccagctcttcattgacctgtcaccactcatccctttcttggctgtctctgacctgatgcgcttcccaccatccctgttagccaacgacagtgtgtaaggttcttgcactactcctcctgctcctgtcacggtcaggccaaccgcatccacctggagcagccccttccggagctcctctctgtttttttctttcatgccagataggcaatgtgccaacatcgtagcaaggtttgagagaggcacatctcacgcctgagtgtgaaaacccaatcattatgctaatgaactacaaaaggatcagagagctcctctctattaaaaccagggagaggatgggcgtggtggctcatgcctgtaatcccagcacgttgggagcccgaggcaggtggatcactaggtccgcctagtgagttcgagaccagcctggccaatatggtgaaaccctgtctctattaaactacaaaaattagccaggcatggtggtgggcgcttgtagtcccagttactctggaggctgaggcaggaggatagcttgaacctgggaggcagaggttgcagtgagccaagatcgtgccactgcactccagcctgggtgacagagcgagactccgtcttaaaaaaaacaaaaaacaaaacaaaacaaaaaaacagggagagtctccttcctatctagacagcagggctacagagggtcagaggaaaacagtttggaggaagacaaagggttaagacccatgactcctcgcagcctggctgccatccgggattacagcccaggaatgaggcctgaacagaaggaggctctggcaaagcgactgctggcccctgaactgtttggggaagtgcctgcctggccccaggagctgctgtgggcagtgctgcccctgctcccccacctccctctggagaactttttgcagctcagccctcaccaggtatgagaatcatcttctttacttgactggcccatcttctgctagtggggacaaagagtcaatggcatgtctctcagtggcccctccctgcaagaaccctatagtgaccccagtgcgagctaaccttccccatctcagatccaggccctggaggatagctggccagcagcaggtctggggccagggcatgcccgccatgtgctgcgcagcctggtaaaccagagtgtccaggatggtgaggagcaggtacgcaggtgagttgttgtgggatcagtaaccaaggcaagagtggaagaggtagagagaggaaggcacagctgtcacgctgggtcggtgttctaggaagaaaggggcaagagagtaggcagtggcctcaggcagcatagagttccaggagagaggtctatagatggtgcccctgtgtagtggtgtagtgtcagagtgcccagtgtatgtacccataccatctgctgccaggcctgccttagtgctagtcttggggaccacacaaaggtcagcttcatgccctcctcaggcttgggcccctcgcctgtttcctgagccctgaggagctgcagagcctagtgcccctgagtgatccaacggggccagtagaacgggggctgctggaatgtgcagccaatgggaccctcagcccagaaggacgggtgagcccctcagcacaagcctacaagactttaggcttcccctgggtctgtgtggatggctttcccattgtgtcaacttgagcacagtggtgccagcccccatcccacttttgcaacctccattccttactccatggccattcttacctgttaccacctcttcctggcccttctctatctggtctgtagcaccccaaacataccctttgccattttgaacctaatctactccagtccaatccctagttccaaaccctagcccaggccctgggaaattcagatgtgggattagagaggaagttcaaggttcatctgtcttttctctccagtcctaaaccttctttggttacaggtggcatatgaacttctgggtgtgttgcgctcatctggaggagcggtgctgagcccccgggagctgcgggtctgggcccctctcttctctcagctgggcctccgcttccttcaggagctgtcagagccccagcttagagccatgcttcctgtcctgcagggaactagtgttacacctgctcaggtttgcctgtctcactccctggcatgtaccctccatccccgcttgagccccagtcaagagaatcccattcagggataaaagcagcccctcctttccctgggtgaacagtagaggtaaactctgtctgcaggaggacgccttcattccctttcctcagatcaagaagggacctgagtcactgaggatggttactggggatggttaagaggcagcgggaagttttggagggtttgccttaggaacccacttaggacctggctgctgggtcctgagagctgttgttttcggtcccatcccaacacaggctgtcctgctgcttggacggctccttcctaggcacgatgtgagtagcagcaacttctcagcctcccgccagaggtctctatcctcttttaacctggctcctgcatctgcccctcctctctctccgctcccctcatacttactgccttgctgcattgtgattgttgtcttccccaacacccttcccttcttcttcaggcctcttgtctctcttgctctttagctatccctggaggaactctgctccttgcaccttctgctaccaggcctcagcccccagacactccaggccatccctaggcgagtcctggtcggggcttgttcctgcctggcccctgaactgtcacgcctctcagcctgccagaccgcagcactgctgcagacctttcgggtatgagagtggcaaggaggatgagataatcagggataccggctctttctggttgggaggaaggcatcttccctgaggccagggaaggcctttcatacctccccacttacacacacacacacacacacacacacacaaccaattctcatgcaggttaaagatggtgttaaaaatatgggtacaacaggtgctggtccagctgtgtgcatccctggtcaggtaagtgtgagatctcccaactgagctcctctccccattctggggcagtttcatatggctggtgctacctcccacactaccctgcagtggccctgagagttctggttagctctgtgcccattagcagccctccccagtgccagatgcaggacagcatgatccactcacattgtcctagactaatgtcaaagctggaagggcctgagaaatcttccaggccacccaccctgctttcagatgaaaagaccaaggctgggagaagctaagggactttgtttgcctggtgcctaactagcagcaacacttgaccacagcagcctgcagtgtgaggctcttaggcgtttattgctacagtggcaaatgccattccacttctgtcctagctttggtccctttccacccccatggttccttttctctgagtgctaagtacagactctctcacctatcactacactgctatacccatcaccgccagcagcctattcccaccacctggccagactgcctgcttcccctgctcccattaaagctgctacaactggattccttggctcttctggcaaatcgaagacgctactgggagctgccctggtctgagcagcaggtaattctccccacttaatttcagaacttcctccctcaatgtagtctaccttctttacctatcccttagccctatttggccagcttatccctactatcctttatttgattgtttgagatacagtctcactctgttgcccaggctgcagtgcagtggcatgatcagagttcgctgtaacctcaaactcatgagctcaggcaatctttctgcctcagcctcctgaatagctaggatgacaggtggttaccaccatgcctggctaatttttaaattttttttttgttttttgagatgaagtcttgctctgtcacccaggcttgagtacagtggcacaagcttggctcactgcaacctctgtctcccgggttcaagcgattctcctgcctcagcctcccgagtagctgggactacaggcactccccacaatgcccggctaattttttttttgttttagtagagacagggtttcaccatattggccaggctggtctcgaactgctgaccttgtgatctgcctgcctctgcctctcaaagtgctgggattacaggtgtgagccaccatgcccggccaatttttaaattttttgtagagacagacaatacaaaaatgtggacactatgtggagacactatgttgaggtactatgctgtccagattggtcttgaactcctggcctcaagcaatcctcctgccttggcctcccaaagtgctgggattacagacctgagccactgcacccagccccctagtatcccttataatgtgacttgcttttctttttctttctccttcccttttctttcatttctttctcactctcgagagaagagtgggcatctgggagagtgggaggctggtgggtcccacagagtgaggaggcaggactgggtccaaggcagtcctgcctctccactctagggggtatccttggacagtgtctcttctgggaaggggctcgtctttctttctcttgtaggcacagtttctctggaagaagatgcaagtacccaccaacctgaccctcaggaatctacagtgagtaacttgtgttgagcagtgcgctgaattcgaccaacatttttttgagtgcttactatgtgccaggcaccatatgatatggaatgggggatatagggatgaatgatgcatagtccctgcctcgtggacgttctcctagcacctccctttgccctcctttccttccacagtgccatgcctatcctgactagagccaaaggactcagaaaacctggattcaggttccagtcctgtcacctacttgtcctcttgggcaagtcatttaacgtccctgtgtcagttttcccttctttaaatgagaattacaatggcaccagcctcataggtagttactgtgaagattaaatgaggtaggtcatgtaagatatttaacacagtgtttggtccattgtaaagttccagtagtcatttgctactgttagtttacttcaggatgacttcagaggcactggccaagcaagaataaataggaataagaaggtatcactttacttatacccacattagaagaacaatgggcttcagaatctttttttttttttttttcgagacagtcttgctctgttgcccaggctggagtgcagtggcgcgatttcggctcactgcaacctctgcctcccaggttcaagcgattctcctgtctcagcctctggagtagctgggattacaggaatgtgccaccatacccagctaatttttgtatttttagtagagatggggtttcaccattttggccaggctggtctcaaactcctgacctcaggtgatccacccgcctcagcctcccaagggcttcagaatctaagacatgtctctagtttcagtttaccacatttctagcagaatgatgttgggaatgtcacctgacttccataaatccttattttctcctctgataaacagcagtgatgttatggggagctgatgagatatctatgtaaaaacatttctcaaaccataaattacggtggatgaacatctgtacttgtgttgagagtactgatatcaaggagcaaacaggctgttgtatgtgttgaatgagcctctccccactcacacacccacagggctctgggcaccctggcaggaggcatgtcctgtgagtttctgcagcagatcaactccatggtagacttccttgaagtggtgcacatgatctatcagctgcccactagagttcgagggagcctggtgagaggggatgcctggactttagtgggagcagggaggctgggaccctaggtatagaacccagctcctatgttctgctctggcctcactctgcttccctacagagggcctgtatctgggcagagctacagcggaggatggcaatgccagaaccagaatggacaactgtagggccagaactgaacgggctggatagcaagctactcctggacttaccgtaagtactgcagctagagatattggcccctcagaaagctcaatctggggtgaagatctgcccttagggaatgccctggaggaggtagtttttctgtctggtagttccctgacataatttatagcccaaagcagaggattttattcaaagttgctctatgtattgactggttcccagaatatgctccagcacagggcagctgagggtggcaacactgtattgaagcctgccaagtaatcttacaataacctagtccacattaattgagattgagacagagcatctgaagtgagggaggcaatgctccaaatctgccccagaggattgtagtttgctcagggcactgtgttcttagtgcattcagaggagtggatcgagagaaaaatatatgaaaaatgtgataaataccttcaaatacctgaggggctatcaagtagaaattagattgtcatatttatgagtggccccattgggcaagactaagagtagttaacggagatcagatttttacatagtataagaaaaactaaggtagtgagttcctggtccttggagctgttcgagcctaagccagatggccccatggcaggaatgttgtagagcacgttcatatacaggttgtgggaagaaaaggctataggaacccaaggctcctccctacccatggagaaatttattagtatgttactcatatgctgcttttctcattttacccctaccaccaccccgttgccatccgcactgtaagtcaggataggaaaatgctggtgttacagtcttcctggggaatatggagctgaagtggagtaaaagcagttgacttcattcttacttttttctttttctttttttttttttttttgagacagagttttgctgtgtcaccaaggctggagtgcagtgacgtgatctcggctcactgcaacctccatcttccaggttcaagcaattctcctgcctcagtctcccgagtagctgggactgtaggtgtgcaccaccatgccaggctaatttttgtatttgttgtagggacgagctttcaccatgttggccaggctggtcttgaactcctggcttcaagtgatctgcccacctcggcttcccaacattcttatatttttataggcctttccacagatttcagctcttgtatgacttagcccagttccagaactggtaatcctaggtagggtacaggttatcacctctgatttcgggtaaaagggatttatttatttatttgtttatttatttatatttttgagacagagtctcgctctgtcacccaggctggagtgcaatggtgccatctcggctcactgcaacctctccctctggggttcaagcacttctgcctcagcctcctgagtagctgggattacaggcgcgtgccaccacacccggctaatttttgcatttttagtagagacggggtttcaccatgttgctcagggtggtctcgaatttctgaccctgtgatctgcctgcctcggcctcccaaagtgctgggattacaggcatgagccactgcgtccggcctgtttttacttttttttaatgccattcagatctgtttaaatatgtgggttctgtgagataatttagaatcccaaggttacagatgaggtgaaagatcctagaccatgcatcaaaaaacttgagtttctcatttgtgaaagaaggataagagaaacacctattttgtctgggtgcagtggctcatgcctataatcccagcatttggggaggccaaggtgggtggatcacggaggtcaggtgttcaagaccagactggccaacatggcaaaacaccatctctactaaaaatacaaaagttagctgggcgtggtggcacgtgcgtgtaattccagctattcgggaggctgaggcacgagaattgcttgaacctgggaggtgcgggttgcagtgaactgagatcgcagcaccactgtgctccagcctgagtgatggagtgaggccaggtcttgttgtaggatcaaatgagataacacctgaaagaactttgtaaattgtatagcacgtacaaacaagaagggacctcttcacaagcagaggaagggtggtcctgtggaaaaaaacgggaattgggagtgagagacctcaacatttgatctctgtgaacctcagttttttaatctataaaatggggaaatgttaatggtacttaatatttggagcttttgagtccattagatcaggtaggattgttcgttattttttttttttaggaagactagaaatatgttgctccctttttctcccccactcaagcttgatggtgggaattggccctggagctgtttactgtcagttcctgtccagcttcactaaatttggtctggggtcacatcttagctggggactgtggggttctgtggtcccttctcgacttggcccagctccacttgaatgatattgttgtcaaattgctataatagaatccagttgatggacagactatccaatgaatccattatgttggtggtggagctggtgcaaagagctccagagcagctgctggcactgacccccctccaccaggcagccctggcagagagggcactacaaaacctggtaagagtccaccctaccagactcagatttgctgccctgggcaattcttgctcctcagacaatgctctctgactgtcctccaaccctctacttcttgctttcttgctgccaaacaggttcctgtctacaaggcctggcccgttttgcctctgggttctgttccttgataatatgcttcacgttacttgtccatacctcttggagtccgagaaatctcttggagtccacctctcagtctttctgcctgctcctatctggtctcattgcttaagaaagtgaacaaaggtagtgagcatcatagggtgctgagttgggagcaggagggagggaaggtcagggggcttggtgtcttgatcaaggtgtctggtattctgagtcagaagtgcattgtccaagttctgatgctcttctccaggctccaaaggagactccagtctcaggggaagtgctggagaccttaggccctttggttggattcctggggacagagagcacacgacagatccccctacagatcctgctgtcccatctcagtcagctgtaaggcttctgcctaggagagacatttgccacagagctgggatggctgctattgcaggagtctgttcttgggtatggatcttcgagaacttcagattctaactcattctatacccagtccctcagccaccatcatcagtggcagcctgttccatattcctaagggcccttggagccctgtgtccgaaatcctagcatgtcctcttttccccttccttttcctcacagttccctcagctccccagcccccgattttcttcctgtccccaggaaaccagagttgtggagccaggatgaagtagagcaagctggacgcctagtattcactctgtctactgaggcaatttccttgatccccagggtgagatgaaggaagaagggaagggagtaaatgcatagaggggactggtgagctggttatggggacccgtggccaacgagggcaaaggatatgaagcctagatctggggggatactgcgaaacagagacaggactttggacttatagctatagcagcaggtcctgatctgtccagatctccccactctccttctaccttctcatgcaggaggccttgggtccagagaccctggagcggcttctagaaaagcagcagagctgggagcagagcagagttggacagctgtgtagggggccacagcttgctgccaagaaagcagccctggtagcaggggtggtgcgaccagctgctgaggatcttccaggtgaaactacccaaatacttatatgtccagcaggatgtacagggagtatcaaacggtctgggttctacatgtgcttttctctgggactgggttttctaatttataaagcaaagagtttagagggatgatcttcaagtctcgtctagttctaaaattctatagctctgggagtgtgtaaactattaagttttcctttagcccagaacttccattttcctgctgtcttgtctctttaaacagctgactcagctctagctcggctaagtgtggagctctctgctggggagatccctcgaaggagacattgtgaggctagagaactggtttcaaattcagctctgccatgaaatccctgaccaacatcctcagtcttccatctataaaatgagggacttggcatctccaatcacttcttgttcaattcacttctaagccctatacatcttaacctgtaatactccctcgatccctacttcccacagtgctccatcctccaaaggttggaagagtcattccatctacagatacctcctggccctgccttcccccttcagaacctgtgccaaattgtgcagatgtacgagggacattcccagcagcctgctctgcaacccagattgctgagatggagctctcagactttaaggactgcctgacactatttgcaggagacccaggacttgggcctgaggaaccacgggcagccatgggcaaagcaaaatgggtcagggacggagagccaactgaggttggccatgaggaagctgtgtgggtgtgatgtaggacacgaagagaatagagagttggatgagaggtgggggaagcagaagataaaagagttagaagatttgggtcacaagtagaaggtgaggagagataaatattgaggaaagagagctactataatgaatagagggactaaagcagtgattaccaaattttaatgcatatcacaatcatcaagggaacagatttttttcttttttctttttttttctttcttaaaaaataatggcatacttcatgaatttgtgtgttatccttgcgcaggcgccatgctaatctctgtatcattccaatttttttttgtatatgtgctgctgaaccgagcacgggaacagtgccaatgctggattaccatgctagactgacttaataaaaacctttgcggaggctggacggagtggctcgtgcctgtaatcacagcactttgggaggctgaggcaggtggattgcttgagcccaggagtttgagaccagactgggcaacatggtgaagccctgtctctactaaaaatagaaaaaaaattagctgggtgtggcggcacatgcctgtaatcccagctactcaggaggctggggtaggagaatcccctgagcgcaggaggtggagggtgcaatgagccaagatcacaccactgcactccagcctgggtgtcagagcaagaccctgtctcataaattaaaaaataagcctctgggagaaagtctagacatctgcatctgcttttttttttttttttttttttgagacacagtctcactctgtcacccagcatccaggctggagtgcggtggtgtgatcttggctcactgtaacctctacatcctgggctcaaacgatcctcctgcctcagcctctcgagaagctgggactacaggtgcacaccactacacctggctaatttttgtatttttggtagagatgaggtttcgctgtgttgcccaggatggtcttgaactcctgggctcaagcattcctcccacctcagcctcccaaagtgctgggattacagctgtgagccactgtgctgggccccaggcatctgcattttaataagcgtctctgtgtctgatgcacataaaagtgtggaactcatggactagagttagtttgctcttcttttccactgattgtaatgtctttcaaaacaccttagaggaactgtaaggcaacggtctcattttatagtggaggaaaccaaagaaaaggcaagtgacttgcctagagttatacagctaaggtcagaggcaagacttaaaacccagcattctgactcccaatctactggttttccactcacattgttcctctctttctcctagttgtggggtcccccccggggatttggtcctgagcagatcctgcagctcggtagactcttaataggtctgggagatcaggaactacaggagctgatcctagtggactggggagtgctgagcaccctggggcagatagatggctggagctccactcaggtaacacttttactcctccctaccgcttcccaaacacccatcccacagacccagccctatagatcatctaaagcccaaggaattttttcctgtgaccctacctggtcattctttctgtcttttgttaatatcccatactagtgaccttcaggactcttgatttattcactctgaggccctggacacataatactgtctcctacctcttttcctggaggcttcctctttttctttccttttcttttctgagtcctcagccttccccatgactccttaggtcttaatagtaacagaatataacccagtaacacctatcacttccctgtccattaattctccataactttcctccttcccctcttctcccaccccccaccccagctccgcattgtggtctccagtttcctacggcagagtggtcggcatgtgagccacctggacttcgttcatctgacagcgctgggttatactctctgtggactgcggccagaggagctccagcacatcagcagttgggagtttaggtcatttgtgaaggggctgagggtggtcgtgttcaggtaaaggtggacttgctggggaaaggaggatcatgaagttatagtcccatggaggaagggaactcatttgaagccatctcttcctttgtctcatgaccacagtccctttcactgaagccgaattcttcttccttccttcccactgttctacagccaagcagctctcttcctgggcaccctgcatctgcagtgctctgaggaacaactggagtttctggcccacctctttgtactgcctggtgggtttggcccaatcagtaactgggggcctgagatcttcactgaaattggcaccatagcaggtggggagctgggccactgctggtgcaagttggtttggtttctataccatgggtggactggatggaagactgccctgcaattcttcaggtgtgggcctgagagggtgtttaaataaggggctagagacatattggggaaggtctatgatagggcactttgggagtagttagagaaggtctataggtttgaagagagggaaggtcagtctaagacaatgtttggatgccacttgcttcaacagctgggatcccagacctggctctttcagcactgctgcggggacagatccagggcgttactcctcttgccatttctgtcatccctcctcctaaatttgctgtaagtattaatggactggggtgaccacaggagagccagggcccaatggggactacatgcatgcactgattcctacccctgccctcaggtggtgtttagtcccatccaactatctagtctcgccagtgctcaggctgtggctgtcactcctgagcaaatggcctttctgagtcctgagcagcgacgagcagttgcatgggcccaacatgagggaaaggagagcccagaacagcaaggtgagttcccagctgcacagcttgatcctccatctcctgacccagaatcaaacccctaatttggtgctgtctggctcttagagtgcacccagggagatccctggagtgaaggagtctacaggcagagcgctaatttccaagtatcaatgctcctggagagctgagttgtgatattactcccattccctgtctattataggtcgaagtacagcctggggcctccaggactggtcacgaccttcctggtccctggtattgactatcagcttccttggccacctgctatgagcctgtctctacagtagaaggagattgtggggagagaaatcttaagtcataatgaataaagtgcaaacagaagtgcatcctgattattttcagaagctgatgaggaata

SEQ ID NO: 39 - protein, 245 aa, Homo sapiens
MPSQQKKIIFCMAGVFSFACALGVVTALGTPLWIKATVLCKTGALLVNASGQELDKFMGEMQYGLFHGEGVRQCGLGARPFRFSFFPDLLKAIPVSIHVNVILFSAILIVLTMVGTAFFMYNAFGKPFETLHGPLGLYLLSFISVALWLPATRHQAQGSCGCLVMILFASEVKIHHLSEKIANYKEGTYVYKTQSEKYTTSFWVIFFCFFVHFLNGLLIRLAGFQFPFAKSKDAETTNVAADLMY

SEQ ID NO: 40 - DNA, 738 bp, Homo sapiens
  source 1..738: mol_type = other DNA
atgccaagccaacagaagaaaatcattttttgcatggccggagtgttcagttttgcatgtgccctcggagttgtgacagccttggggacaccgttgtggatcaaagccactgtcctctgcaaaacgggagctctgctcgtcaatgcctcagggcaggagctggacaagtttatgggtgaaatgcagtacgggcttttccacggagagggtgtgaggcagtgtgggttgggagcaaggccctttcggttctcattttttccagatttgctcaaagcaatcccagtgagcatccacgtcaatgtcattctcttctctgccatccttattgtgttaaccatggtggggacagccttcttcatgtacaatgcttttggaaaaccttttgaaactctgcatggtcccctagggctgtaccttttgagcttcatttcagttgccctttggctgccagctaccaggcaccaggctcaaggctcctgtggctgtcttgtcatgatattgtttgcctctgaagtgaaaatccatcacctctcagaaaaaattgcaaattataaagaagggacttatgtctacaaaacgcaaagtgaaaaatataccacctcattctgggtcattttcttttgcttttttgttcattttctgaatgggctcctaatacgacttgctggatttcagttcccttttgcaaaatctaaagacgcagaaacaactaatgtagctgcagatctaatgtactga

SEQ ID NO: 41 - protein, 232 aa, Homo sapiens
MPSQQKKIIFCMAGVFSFACALGVVTALGTPLWIKATVLCKTGALLVNASGQELDKFMGEMQYGLFHGEGVRQCGLGARPFRFSFFPDLLKAIPVSIHVNVILFSAILIVLTMVGTAFFMYNAFGKPFETLHGPLGLYLLSFISGSCGCLVMILFASEVKIHHLSEKIANYKEGTYVYKTQSEKYTTSFWVIFFCFFVHFLNGLLIRLAGFQFPFAKSKDAETTNVAADLMY

SEQ ID NO: 42 - DNA, 699 bp, Homo sapiens
  source 1..699: mol_type = other DNA
atgccaagccaacagaagaaaatcattttttgcatggccggagtgttcagttttgcatgtgccctcggagttgtgacagccttggggacaccgttgtggatcaaagccactgtcctctgcaaaacgggagctctgctcgtcaatgcctcagggcaggagctggacaagtttatgggtgaaatgcagtacgggcttttccacggagagggtgtgaggcagtgtgggttgggagcaaggccctttcggttctcattttttccagatttgctcaaagcaatcccagtgagcatccacgtcaatgtcattctcttctctgccatccttattgtgttaaccatggtggggacagccttcttcatgtacaatgcttttggaaaaccttttgaaactctgcatggtcccctagggctgtaccttttgagcttcatttcaggctcctgtggctgtcttgtcatgatattgtttgcctctgaagtgaaaatccatcacctctcagaaaaaattgcaaattataaagaagggacttatgtctacaaaacgcaaagtgaaaaatataccacctcattctgggtcattttcttttgcttttttgttcattttctgaatgggctcctaatacgacttgctggatttcagttcccttttgcaaaatctaaagacgcagaaacaactaatgtagctgcagatctaatgtactga

SEQ ID NO: 43 - protein, 120 aa, Homo sapiens
MQALQQQPVFPDLLKAIPVSIHVNVILFSAILIVLTMVGTAFFMYNAFGKPFETLHGPLGLYLLSFISGSCGCLVMILFASEVKIHHLSEKIANYKEGTYVYKTQSEKYTTSFWLTKGHS

SEQ ID NO: 44 - DNA, 363 bp, Homo sapiens
  source 1..363: mol_type = other DNA
atgcaggccctgcagcagcaaccagtttttccagatttgctcaaagcaatcccagtgagcatccacgtcaatgtcattctcttctctgccatccttattgtgttaaccatggtggggacagccttcttcatgtacaatgcttttggaaaaccttttgaaactctgcatggtcccctagggctgtaccttttgagcttcatttcaggctcctgtggctgtcttgtcatgatattgtttgcctctgaagtgaaaatccatcacctctcagaaaaaattgcaaattataaagaagggacttatgtctacaaaacgcaaagtgaaaaatataccacctcattctggctgactaaaggccacagctga

SEQ ID NO: 45 - protein, 185 aa, Homo sapiens
MPSQQKKIIFCMAGVFSFACALGVVTALGTPLWIKATVLCKTGALLVNASGQELDKFMGEMQYGLFHGEGVRQCGLGARPFRFSCYFLDPFMGLPTGVPHLLSLPCSTSCRREHTSERVQEPAGCFSAVRSKLHAGPAAATSFSRFAQSNPSEHPRQCHSLLCHPYCVNHGGDSLLHVQCFWKTF

SEQ ID NO: 46 - DNA, 558 bp, Homo sapiens
  source 1..558: mol_type = other DNA
atgccaagccaacagaagaaaatcattttttgcatggccggagtgttcagttttgcatgtgccctcggagttgtgacagccttggggacaccgttgtggatcaaagccactgtcctctgcaaaacgggagctctgctcgtcaatgcctcagggcaggagctggacaagtttatgggtgaaatgcagtacgggcttttccacggagagggtgtgaggcagtgtgggttgggagcaaggccctttcggttctcatgctattttcttgaccccttcatgggactcccaacaggggtaccccatttactcagcctgccctgctcaacctcttgcaggagggagcacacgagtgaacgagtgcaggaaccagctggctgctttagtgctgtgaggagtaaactccatgcaggccctgcagcagcaaccagtttttccagatttgctcaaagcaatcccagtgagcatccacgtcaatgtcattctcttctctgccatccttattgtgttaaccatggtggggacagccttcttcatgtacaatgcttttggaaaaccttttga

SEQ ID NO: 47 - DNA, 46837 bp, Homo sapiens
  source 1..46837: mol_type = other DNA
aggagatacttgaaggcagtttgaaagacttgttttacagattcttagtccaaagatttccaattagggagaagaagcagcagaaaaggagaaaagccaagtatgagtgatgatgaggccttcatctactgacatttaacctggcgagaaccgtcgatggtgaagttgccttttcagctgggagctgtccgttcagcttccgtaataaatgcagtcaaagaggcagtcccttcccattgctcacaaaggtcttgtttttgaacctcgccctcacagaagccgtttctcatcatgccaagccaacagaagaaaatcattttttgcatggccggagtgttcagttttgcatgtgccctcggagttgtgacagccttggggacaccgttgtggatcaaagccactgtcctctgcaaaacgggagctctgctcgtcaatgcctcagggcaggagctggacaagtttatgggtgaaatgcagtacgggcttttccacggagagggtgtgaggcagtgtgggttgggagcaaggccctttcggttctcatgtaagtagcaattgcatttgagttatttaatgctttaggcagactcttcccagtgttgcgaggaattatatttgagaattttgccgtgtttactgcaggactttttaaatcggtgtgaaccatatgaaaaacctatgactctgagcaatttcttcttcctagtttttattattttatacttgctttttattataatatagagttaattcattgttacataattaaggtttttggaaatattggcaattaagatgcttaagtattaatatttatgtaaaaaattatggagtctttttaaaaaagtaaacttggggaaataggaaagctgtaaagaatgatctttatgctttttgttctttataaaaagaaccaaggtcatgggctccgtatttaaccaggttgccacctttctcatgattttgtttcctgctccccactccctcccattattcctgctaagacctttcctgctgctaaatattcagttttcatttttaactaatttggaatcatttggctatagaaatttaaaatgatctgctgtgctaactgggaaagaaatggatgcctatttagtatagaacattttaaactgattgacctgcaaatcatgtagagaatatgagagagattttcttgttgtgatttttgtgaaatggaagtgtaatccacagtatttataacctgtttatcttaagaagagaatttttaaaaattaccatgtgaataggcaactcattaaatgaaaattaataggaagtcatttgttatatctcttacaacacacattcagaagttattattatttcagaagggctggtttggaacaaccttatgaagacacagtcagtaaattactgcataaatcactcttcaggaaaggaggttaccaactgaagcatttaaaatgaattattattttgcccaggttttttttttctttctagtataggtagaaggctaaattaattgaatttattattaacatatgcagtgcctaattaaatttcagtgctggtctatttatatttctgcaacattccttatatcttcttagcagtcattggacaccaaccttcagctcacataggttactaagtgatatgaattttcatagggctccagaaaatttccaagaattggttgttagctttttaattgatgaagtggataccagttcttttcactgaatggcttttattcattaaggtaatggggctgttagagttgcttagttttcctggggaaggggaaggaagaaaacaaagcagaatgtcatgtgatatgcaactgtattaaaaaaccgaaaaggaaaaaagttgagagagatgatttaaccgtgagtcaccggcagccaaagcgtgagtaaagcttctcacagatgaatttagacaaaagcggagaaggtactggtgaattttctggagcctttacattttctacagtgaaatggagataaactttactcatgccataggacatgtttcaaaacaataataagatgttttctgaacacttactacatactaagcactttatatgctttgtctcatttaatccttacacagccacattcttctggggtttagcgaatgatttttgtggttgtgtcctatgcttgtcctgtctaaggatgaagttgttctaattgggtgcccctccttttgctttctgtgaggacttgcagaactggtggggtttaaacagtaccctcacttatctcacagaatttcattagctcccagatacccctgacattctccccctagcctagtgaagaaaatcttccatttacttgttcattctgcagtgacagctccatcaatatacaatagactatacatattaagtgtactgtatatactatacatgttaaaaatctcattcattttggtgaggcccagctaagaatacttacagtagagcttttttttttttcctaagcataaaagtatctttttcaatgcagcatgagacagagttgggaaaaccaaaataaatagatccaatggactccccaaagaggataatattcatttaaataaacacccctctcagtgttaaaactttctaatcaacatgcctttgggacacattgcaccctcaaagtttacactcccattgcaacgcagctttgtggttcacgttttttccattcagaatgtcattaccctgtcaatgatgtttcatcaacgtttgcttggatgagaatcctctgatattcttcctgatagaaatgtataagccctgttcatataaatgaataaaagatctaaccttactttctcagtagtggcttccttggagcaaaaagcagggacctccagagagctcaggtggatgactcttttctgtttcttccagagctcaacttacaattagtgcacaattcatttcccagaatgtcttctttcttattgtgcctttagaaagttattaagcaaacatttgaattcacagaatcttaccagtgtaagaggaatggaaaaggtaacttatcaaggtaacaatcacttcgtggccagttttttcggctcactgcaactacccctcctgggttcaagcgattctcctgcctcagcctcccaagtagctgggactacaggcgtgcaccaccatgcccagctaattttttttttgtatttttagtaaagacagggtttcaccatgtgggccaggctggtctcatggcaagttttctttgtgttgtcatgttattatcaattaataggaatttatatttcagttctgttaggtggataaacactattttgcatacctaaatgtttcatttatatcagcactggccaataaaaatatactataagcaggccgggtgcagtggctcacgcctgtaatcccaacttttgggaggccaacactttgggaggacacagggtcaggagatcgagaccatcctggctaacctggtgaaatcccgtctctactaaaaatacaaaaaattagccgggcgtggcgggggcgcctgtagtcccagctacttgggaggctgaggcaggagaatggcacgaacccgggaggtggagcttgcagtgagccgagatctcgccactgcactccagccttggtgacagagcaagactctgtctcaaaaaaaaaaaaaaaaaaaaaaaaaaaaaaatatatatatatatatatatattacaagccacaagccacatatgtacttttaaatgtcctagtagccatattagaaaacaaaagtaaaaaggaatagatgaaattaattttaatgatttttttaaacccaagatatccaaaatattatcattttaacatataattaaaaatttattgagatgttttacattgtttttttttttcttgacgctgtcttggaaatctagagtgtattttacatttacattacatctaattcagtctagccacatttcacatgctcatttttttgtgtgtggttttatggagcagagagtttaataggcaagaaagaaaagagaaggcagaagaaaatggctcccctgtacagagacgcgggggtggggcgctccaaagccaaaagaggaggtccctaagtatggtagacaccagccaggaatatatgcagtgtctggaggaggggatgtctgatttgcatagggtcacatgctcatttttatggctactgtattggtcagtacagatttagatggggatttgctctgaacaagttggtgattgatggtgttcatattttaattgaatttttcctgggttctgctgtacacttgtatgtgtgttagtttcatgtgcaatgcttgtgtcacttttaaaacccagatatatggcataacatgagaatgaaaaatggaccagaaaaatagtttggcaatgtagtcatgtttgttcctattaaatgttccctattgaccactctatctcttttaattataacaagaatctgccctgccagcatgcccagttacgctgggaaaacttctgcctcatttactctggctgattctcatccacttatgggtcagtggttcattttctagaggtcaccagcattcatacctagcatacaatttcattcattataatgaaggaatgttttcccttcaaagagacacaactagtgggcttaatttttcttgatatgtcacctgtaaaattttaatgatgatgtttaaactctaaatgtagccatcaagacaaaaactgcaaattttgagcctcagtgtgtgtgggtgggtttctgtttcggtaatttgaaacattgcagaatatcatcaaaatatgatacccaagaatcatatggtatcaatcattcctagatatactgatctattcattgccaagatagttcaatgagctggcaaaaacatatggaattattttcttaaaatgtgaaaaataaaatttaaccaatcatgtatcacagcttgcaactttagtcatactttgaaaagcattttaatttggacctcatgattgaaaatttataaaaagctgaacagaaattagttcacttcatattttagaaaagcagagtttctttactaaatgaggcatttgacccaaattggagagaaaatgttgaaactacttctgtgagcaagcaggtggcttctcaaacacatgttgggatgaaatggttgggcctcagggtctcagtgcctgtcactgagagttggcactctctatctccatggtctcctccaagtgtgactcttgtctcttgctgacctgacctgccccaagtgactcactggtcatgaccctgcacaccttgcgtctctcctatcaccctgccgatggcagagctacaaaggtctttgatgtagctctgtctgatatcctgtgtttccccctatggtctgtgtggaagcaggtatgggggtgtgtaaaggggaagcctatgaagttcatctgcaaagactacctggttaggggaggagaggaagaagctatatgcaccatttcaccagcaagcatgggctcttctgccttttagcttaggggtcctgttgtctagtctcactcacctattaaaacagtccagcaaatagaggttttgtttacctcccattaaaaaaaaagcaattaatggaatagaagataataatgtatgagaagcactattgtgaaagaaaaaccttcaacttctctcagccaaataattgcttcctcctctgtccttcccagaccttgatgtttgctctattatttcaaaacaactatattataaatatttgagaatgtgtatttccctgcaaggagatcttaatccccaagaaggcaggagctgtgtattattcatcccagtgctccttcaaaccagggcctcagacagtgcatggcccaaagaggtacttaataaacgtttggtaaactgacactattgaaattaagcaacctggatttgaggtgggtctctgccactcacaagagattacgctttgagaaaattccatcacttcattgattttcagttcttgcatctgtatatgggagacgatactaggtgatttctgacatctctcaccgtttaaatgctctgtgatctatacaacgaggggctcgctgttctagacaagttccttccagctttacagttgcataacccttctaatcttagtcacatgatgactccactgacagatttttggccaccatcattagacatgctgagttacgtgtgcctttgctctgatcctcaaaactcatgatttttaaagttttctgaaatatctaccatttatcaggatccagatggatttcatgaccaaagtggatgtttcttttctctcccattacaatcttttactttttgtgtgggaaattgcatgttaaagaaagggaaattgaagaatgggatgctttggaattctggcaagatggattagtgggttccagaaagtaggggcagccacaaataccgaaataaatgagatcgtattattgagaaagcacaaatggaagaaggtcaaaagcaagaagaagctgacatcctgcttcctccaatttttgctttctctgtttttccaagaaactcctcttccaagccttgctgaaaaactccactttcctaaatctaacttcttaaactgataatggcaagaagttaggaatgaccaatatgtttaacactccaagagtatttgttttgttttgttttgagactgggtctcactctgtcgtccagcctggagtgcagtggtgtgatcacagctcactgcagccttgacctctcctgcccaaggaatcctcccacctcagcctcctgagtagaagggaccacaggcatgtgccactacacctggctaacttttaaaaaatttttttgtagagatggggttgcccaggcaggtctcaaactgctgggctcaagcaatcctcctgcattggcctcccaaagtgctggaattatgggcataagccactacgcctgacctctccaagggcattctttacccagaagaggaacttggcagaacttatcctccaattggtgaggaatatggagaaaatgactttaagcaaaggaacttctggttctgcctacctaatccagaaaaagaagttttatttctcccttcccctagtaactatcttcccatattcacataaaaaagtacagaatcaacattgttcaagaattataattttacttgtaagcacatgtgcacacgcacacccatataccttccttccctttaaatcatcccacaccctaatagtagtaaaatcattgacccgagcatacctgggagaggaagaggagtctgacaggggcaggttctaagtggcactcctggaacttaaccctggtgtatatgaactttacctattgaaggatgactcctcaactgttctcacaatttgctgctctgctttcttttctaatttctgaaggtgactcatcttccccaaggactttcagacttctcagaagaaaaaaatattgggtgggtctctgccactggcaaaagattagactttgagaatcataaaagtatatcagtatatactcattaatattgaattactataattaatattatgatattgatataatgatagaatgatattgataaaagcaatattcaataatgaatattatttcagctgcccacttattgggtgcctcataggtgccaggcattttgtatgtattatctacaacccttacatgggacatattatgatgctgtttctcttgaagaaatatggaaactggaaacagagaggtcaccacaattttccaaagtcacatagctaataggtagcagacttgggattcaaattcatatgcatatggtaaatcatgctcttcctctgctacattttgcccccttagaatatgaaaaagggatacaaagagatgaagaaaatatgtaagattatccttcaatttcactatcttttttaaagttttttttattatactttaaattctgaaatacatgtgcagaacatgcaggtttgttacataggtatacacgtgccatgatggtttgttgcacccatcaacctgtcatctacattaggtatttttcctaatgctatccctcccctagtcccccacccaccgacaagccccggtgtgtgatattcccctccctgtgtccatgtgttctcattgttcaactcccacttatgagtgagaacatgcggtgtttggttttctgttcctgcgtcagtttgctgagaatgatggtttccagcttcattcatgttcctgcaaaaggcatgaactcattttatggctgcataccattctatggtatacatgtgccacattttcttaatctagtctatcattgatgggcatttggcttagttccaagtccttgctattgtgaacagtgctgcaataaacatatgtgggcatatgtctttatagtagaatgatttataatcctttgggtatagacccagtaatgggattgctgggtcaaatggcatttctggttctaggtccttcaggaattgccacactgtcttccacaatagctgaactagtttacactcccaccaacagtgtaaaagcgttcctatttctccacatcctctccaacatctgttgcttcctgactttttaatgattgccattctaattggagtgagatggtatctcagtgtggttttgattagcatttctttaatgacaagtgatgatgagctttttttcatgtttgttggccgtataaatgtcttcttttgagaagtgtccgttcatatcctttgcccactttttaacggggttttttcttgtaaatttgtttaacttccttgtagattctggatattagtcctttgtcagatgggtagattgcaaaaattttcttccattctgcaggttgcccgttcactctgataatagtttcttttgctgcgcagaagtttttttagtttaattagatcccatttgtcaattttggcttttgttgccattgcttttggtgtttagtcatgaagtctttgcccacgcctatgtcctgaatggtaatgcctaggttttcttctaggatttttatggttttaggtcttatgtttaaatctttaatccatcttgagttaatttttgtataaggtataaggaaggggtccagtttagttttctgcatatggctagccagttttcccaacaccatttattaaatagggaatcctttccccgttgcttgtttttgtcaggtttgtcaaagagcagatggttgtagatgtgtggcattatttctgaggcctctgttctgtttcattggtctctgtatctgttttgatacaagtaccatgctgttttggttactgtagacttgtagtataatttgaagtcaggtagcgtaatacctccagttttgttctttttgcttaggattgtcttgactattcaggctcttttttggttccatatgaaatttaaagtagttttttctaattctgtgaagaaagtcaatggtagcttgatgggaaaagcattgaatctataagttactttgggcagtatggccattttcatgatattaattcttcctatccgtgagcatggaatgtttttccatttgtttgtgtcctttcttatttccttgagcagtagtttgtagttctccttgaagaggtccatcacatcccttgtaagttgtattcctaggtattttgttctctttgtagcaattgtgaatggaagttcactcataagtttgctctctgtttgtctgttattggtgtataggaatgcttgtgatttttgcacattgattttgtatcctgagactttgccgaagttgcttatcagcttaaggagattttgggctgagacgacagggttttctaaatatacaatcatctcatctgcaaacagagacaatttgacttcctctcttcctatttgaatacgctttatttctttctcttgcctgtttgccctggccagaacttccaatactgtgttgaataggagtgttcaccacctattttaagaatagtattgaagcctcacaaaagctggttctcatgtaaccatctgagaatatttggccttatgacttgaattcattcattgcctttttatttcacattttagtgatcctgatgtctaaatcttaatctttgatccttgcaaggtaaaatagccaagtcaagcctgtttaataatattggttgaggaagtcacatgcttatgatcaatctttgggttatgtaattatattaccttaatgttggcagtttaggtgtaaggcagagatatctgatcacatgtgtggttagctaatttaagatcactgccaactaaaatcttcatggtatgatcttcaaagttagctactttgaccacagcaatgatttcaccacagcaattaacaaaatggcagactctttcctgaggtggcatgaacagttttaaaacaaagtcaaggaccaaaagaaaagcaggcacatggcatttgattcatttcaaaaactagtattgtattaagagccaaggggatagaattgtagcatcaattaaaatcttgtttgaaaaaaaataaaaacaaacgtccatttttatctctcaaatatattagggttttcataaagttataggtgtatttttaaaaaaacaaaactcatatacattagactgaaaaatttgcctgtcatctcatcatgcagctaaatgcaattgtctatggcgagatacactcttattagaggtatgatagcactaactaatagcaaactttgtacctggtagtctaatttatgcagggttcatatttcgctccctctcagcatgctgtaactgtggcaaagccattctcaggagttattaccccaacataatcatacccctgtggattaggagcagttaaatgggtcctgttatcagagacacatatgtgccacagccgctgtcatccctaagccaccgtgggtgattaagactcactgatgggactacctctgaataggcttgagtgaggtggatacacttcagctgagagaaattcaggtaaggggctgagaaaatcagattttgaatggttttatcataccatcaggtctccttttaagtgctggggtcatggatttcattcaacctgaccacatagcctttggaagcttggctcaatacctgagtgtgagattatgggtgatattaaaggagatgaatgcattgagctgatgtcagagaatgtcttttactggattttcataatgactggctgcagatgggctgaggggaaagtcagatcaagagcatttctgtaagaagaaagaaatcttccctcttattctctttcaagaaaatgaatagctgagcaccaagaggccaaatacttttttaaaaaacacatccttttatgtagagaaggacaggttgagacgaaaaacaggacctctgaaactgtctttatagctttaatctaggaagaaattgcggcaccattgctgacatcattatcagaggctgccttagttctgagagcttcacagatggccttttctgcattttacatctggccagatgaaggcaaaaaggttgatgaaaccaaaactattagatcagtggtccataactctggctgcactttagaatcatctggggagtccttaaaactactgatcctgaggctccatcccagaccaattgaatcaggatctctgggggtgggacctgagcattggaatgctttaaaagttcctcagggactctaatgtgcagccaaggctgagaatgactgaggtggatggtggccaagacaggtgaggccaagagttagaagcccttactgttagggaaggcagaagccacaaggaggaggggagggggaaggagcagtatttagcatttcttccacacagttggggggttttctgatcaaaattaggctgggatctttcgcttccattttcatgaaggtcttatgctttgtccacagccacctggcctcagggcaatgagcaatctgattgatgaattttcagtaagaaactgagcacacttggctctcagccccagtggcttcccctgtttccaaatctgcccaccagttacaggagcctgctcaccaactggttgggttaaagaagtcggctctgtccttggcagggaggccttcagctgtctggccctgtctgtgactgcgtgggtgaagctgcctaatttggggaacttgatggaagatctaagctatgttctctaacagttttatcagaaataaagttaacttttgacctccatctgcctgtctcctgtggaagggctctgctccttccaaagagactctcaggggttctccttagaggtgtgttatcagtccaaagatcattttagaccagccattacagaggatgtccaagaaattgcacaagggaaatagaagtaagaatgagagcaatatatcagatagtaaggaaagtatgtgactggtttcaaataagtaattaaccataaatccaaagttcctgcattagttatagcaatagtcatccacctggtcaggaaaaaaaaagtaaaagactgagctgcaagatagaaagtttgcctgaattccacgtacttcaaggactactatggaggattccttggtcccaatgcagagacatgtactctgaccacccatgggccaaatccctcttacccaccctcagtgattcctcctgggacctcactacattgagttcttacattccccactcttttcgggggaaatataacccttctgctcttctcatgatgttaaaaatatttagacaattacttaaaatttacaacaatcttccacataaatgatctcacttatgtttcttgtgagctctgtgatttatttctattatcatctatgctgatagttaaggaaactgagatatcgagaccaacatgcatagtaaatggcaaaaccagatgaattttaaactttcctaactccaaaagccacatcctgcccaacccgccatgctgccgctcagttaatgcctggctgtttgtctccccattggcccctctacccattgtgctttgatggcacactgtattccaactgcctgagactcctggttaatgccattacgtacagacttaggttgaatttactaggatttttaagatttgtaggataagagatatgactgttagactggaatcagcaatagataaaaggttaacaaagtttcagaataaaatataatagaaaaccccagcagatagaagtaaaatgaatggtaagacaactgaaatgaaagccatacatttagaaatatcaaataaaacacagattaatggcagacaataaaggaacatacttagcagttagtaaaaacactttttaccttattcttattaccctccagtaaccttttttttttttttttttgagacaaagtctcgctgtgtcgtccaggctggagggtagtgatgtgatctcggctcactgcaacttctgcctcttgggctgaagagattctcctgccccagcctcctgagtagctgggactataggggcccatcactgcacctggctaatttttgtatttttagtagagacggggtttcaccatgttggccaggctggtcttgaactcctggcctcaggtgatccacccgcctcagcctcccaaagtgctgagattacaagcgtgagccaccaagcccggctgtaacctattgaaaataacattacttgacatgtgagacaaattatttgtaagttaaagagtttatgtgccttcaatgctcccacccttccctcccctaaaaagattattgagtgcccatgatgtgcctaagccttctggtagactctgagaatgtgaagagagttagaggatacttgttcaacaacccagaatctagcagaagtgttttgaaatgaccagccacttgggagagctatgctagcatatcattcaggatgggctgggtcatgttttaataacaagtaagtttgaactttataggtttgaaacaaaaaagatgtgtttcttgctcacagttcatattttttggagattggctggagcttcattccaggatactgccaccatctggaatgttgacagttaccgtaacagagaaagagttgtggaggctgtcacactggcaattaaattcgctgacctggaactgacacatgccacctccacttatattttattggccaaggcttgttacacagccacatctaacttcagagaggtcaagatgagcaaatcctaccacgagctatagatggatgagtagcactcattattatcacaattattttatttgttataaaaactccaagaaggagaggtactctatgtgaggaataggcataggaaaatcagagggaagttcttaaagatgagctagatttcactagatggcattgaagaaacattccaagtaaatgaacagcataagcaaatgcatgaagaacttattgtggtcctagtacagacgatgcgtgagagtgtggaggagggaaaaggtaagactggagaggaaggcaggaaccagaacaggacagactgtgttcactgtcaggcagttaagtctatcttgtaggcaacatgaagccttttaaggaaggcaagcagctatgtgacaggacagaagatggattggaagaaaatcaaaagagaagtggggaccagtcataaggctcctccaatatttggggatccaaaccaaagcactggcagagaaatagaaaggaagggaaatatttccaaaatattcaaaacagaaaccaagagaacttgatgacagaagatgaacccaggtttctactgaatggacagttgttacattctctgagataaggaatacagaaggaaaaagttgagagggaatatgaaattatttttaatcatgtttaatttgatcacttgtggaacatcaaccagagatgtccatcagttacaccaatttgtaggttttgagagaggcctgaggtagaggcagagaagtgggaatcagcagattagcggcagtagttggaaccataactgaagatgagatttcccagggaggggagttgaacaggaaggtagacaaaggctgagtgcagtggctcatacctgtaatcccagcactttgggaggctgcagtgggtagatcacaaacaagatcaggagttcaagaccagcctggccaacatggtgaaaccccgtctctactaaaaaaacacaaaaattagccgggcgtggtggcacacacttgtaatcccagcctcaggaggctgaggcaggagaattgcttgaacccgggaggcagaggttgcagtgagccaagatcgtgccattgcactccagcctgggcgacagagcgagactccgtccccaccgaccccctaaaaaagaaagtagacaaagatgtgtcctagaaaacactaatatgaatgggtagagaggggagacttgtcaaggagatcgaggggagagtcagtgaggtgaaaccttagaggatagaccttcaccaaggaagtaacagtcaacaggcctaaatgccacagagatgtcaaatgagagacactggaaatggttctttgaatattacagccagaacatcacaggagaccatttccaaagcagtcttgatgaagtggtggggaagggaggtccctgaaggagctaaggagggactgggagatcatgacccagagataagtgttgcaggtataaaagggaaagactgagatcaggaaatagccacaggatccctaaggccaggcttcgggtggggtggtgtgtgtgtgtgtgtgtgtgtgtgtgtgtgtgtataaaatgggaagaccttgagtataattctgtactaagaagatagagcagtagagaggaaaaggctgaagacagatgggagggtaaatagtgaattagaaaggtctgtgcaaagatgagaaaggatgagtctgaaagcacagggagaagggccagccttggacaggagaaaacatttctttcactaagaataaagggaaggttgggtatacaccacaaagaaggtgtagatgggtggcaatggagttctgtcaagttgagggcattccatgatagcctcacctttctctgtgaaatgagagagtttagtttacaagatatttctgagcacttcataagccaggttcatagactgaaagaagtggaggtggagtgtgataggtccttaagaataggggaagtttggaatatctgacaagggacagagaggaaaaaactagaaaaggctttgcagaatgtgggcccacagatcagaggctaaggggtccccatttgtgcaggagagtaagggcagggaggcaaggctcacagcccaaaatatagagcccctcaccaaatgactgcaggagggcagctttcctatgagagcatccctatcactgttttcactccgagtcattaacttacgacttactcagctctgtttcgtaatagcagactcgagtaatgagggtatgacagcctctctctgcatgccaaggtatgcagcgtggatttcctttttcgctttctctctcctgtggcttaggtgccttctgttctgctaccaggatagagaacccagtgactagtttcttctagctctctttttctgactaggtatcttgtcagaaatttctgcttaccagacttcatggagagggaatcaagctttgaatcagggttgaaaaagtagagcttaatatatatattacaaaatgccactcacgttcttgaggttaccttgtatctataccacaactagcattcttttagaaagcaccattaccgaagtaatccctttcctgggaattcacccaaaaaggttattcccacttatcccccatctccaaaataaaaaagaaaaatgtgtgtgcttagagatgttcctggaagcatgagctgtaatactgaaccaatagaagacgaactaacagattgcagggcatccgtttggcaaaaaacttatgcagttatctaaatgatagttatgaagacaatatgtataacacattatattctgagtgaaaagaacagaaggtgatttcaaaactgcattgggataatagtaatataggaaatagtgagatgaacaaagatttcaaaggaacaaaaataaagaaaaattttgctttttatattggtaggcgtatgggtgaaattccaattttaattttaatttcatagttataaaattgttcataaaaaaaggtcccccatagacagttgggctttgggacaaactaacagaaacagagtaggaagaaaattcatcttccttcaatcccctttctctgcttaaaacaaaacaaaaaagagctttgtcatgttcaggtgtgcaacgaattctttttccaaatctggaactttacatctgctattaaacaggagtcagtttccatgtaacatgttgacaatcccccaagtgtgttggaataattttttttaatgaggagatttgaaattccatttcaattgccaacctgcctctttcaacttctaaaaacaaagtaaaacaaaacaaaaacacactgggtcctatcaccccctcttgctactactattttatctccattgccctgaattctttccaaacttctttccacccagctttgatttgttttcagtcgggtttattgaggcataatttacgtacagtaaaattcatccttcttagatttagaggtctatgcattttgactaatgcatattggcttataatgactaccacaacaaagatatagaacacacccatcactcccgggttctccctgtcccttttttggtccatctcctctcctacccccaaccccttggcaaccactgatctgttttctgtccttatcattttgctttttccaggatgttgtatataaggaatcatgcagcatgcagcctctcgagtctgacttcttccagttagcacagttatttaagatctatccgagttattgtgagtagcagcatcttttttattgctgactagtatttcatcacatggatgggccacaacttgtttatctgttcacctgtcaatggatactaagttgtttccagtttttggcaaatatgaataaagtaaacatttgcatacagatttttgtgtggacacatgttttcaattctcttaggtaaatactgagcaatgggattgctgggttatatgttaagtctatgttcagttttctaagttctgaaacaattggatatctatatgcaaaaatacaaaattaaccttgactcaaacttgtaccatacacaaaaaataacctgaaagagatcacaggtgtaaatgtaaacctagaactaaaaacttcaaggagagaaacatagcagaaaatatttgtgaccttgcattaggcaaagacttcttagatttgacatttgaaacatgatacataaaaaatcttgataaattggagttcataaaaataagaactactcttcaaaagacactgataagagaatgaaaatacaagccacagacagagaaaatatttgtgaatttcttatctgataaagggtttgtatccagcatgcataaagacttttcaaaactcaataataaacaatccaataagaaatgcacaaaagatacaaacacatcatcgaaaatgacctatgaaaggcaaataagcccacaaaaaaattctcaacatcattagacacttgggaaatgcaaattaaaacaacactgagataaactacatatctattaaatggctaccactttaaaaacctgtcaagtgccagccagaatgtggaacaagtaggactctcttacattgctagtgggaaggtgaatggtacagccactttggaaaacactccgcagcttcttatagttacacataggacctgggggtagaggatggattgactgtaaaggggcaaaacttcctggtaggggtggggaaagtttttagaagggtgaaattgttctatatcttgattattgtggtggttacacaactgtctgcatttgtcaaaactcacagaactgtacactaaaaaggtatatttttatgctctgctaattttactttaatcttaaaaataggaaggaaaaaataaaatcaatgccactgtgcgactttgggcaagttacttcacttctctgtgccttggtcttttgaaatctatacattaaggataaaataataccttcctcatactgttagaattaaatgtgctaatttatgttttatatatataaagtacttggccgggtgtggtgactcacacctgtaatcccagcactgtgggaggccgaggtgggcagatcacttgaggacaggagttcaagactagcctggtcaacatggtgaaaccctgtctctactaaaaatacaaaaattagctgggcttggtggtgcgtgcttgtaatcccagctacttgagtggctgaggtgggaggatcacttgaactccagaggtggaggctgcagtgggctccacccactgcctgggtgacagagctagactccatctcgaagaaaaaataagtacttgaaacatagcaaatgttttataattattggcttttttttcttattgttattacttgcattattgctgtttgaagaagtttggtgataatggagagaaaagggcaattaggggtctgggatggtttaagtatgaggagaccgagacacattgactcagagtgaagaaatcaaagataagagaatgaaagaaagggagggtaattctgaacgcacagacaaagttatgttactaacgtggcatcggctgtgtgttgtaataaataactccctttcacttgtcaatagctaatcaaatactttctggagaccagaagtgacttgctggatcaatgacaactcctccacagatcaaaatgttcaaatcctttttctgtgttgtaatcctaaatctaaaagaacagagagaccaagcaaatctacctcccaacatcattaaagtgacaactctcagtatttatttgaatggtctgctctcagcttcaaccaaggaaaagtcaaattagtgttggtcagaaaacagaagggtgttacgagagttctggctggtcattacagacttggggatttttgattaaaagaagaagaagaagaagaaacctgataaagtgtaaatatagcaagcagggattagtgtcctgctgggtcatgttctcacaacagtgagaatttcagagatttcataagaattaaactgctccacatgacaatttattttaccttctggcttttccaggaggcaaatcagtgcaacttctttctgcctttgtttcaatttggtaacaaccctcaattttaggacaggctaaacctagccaccctatcagagatgatgaagtagccatctttttaacaggtggggagatgaatggaatcagggtttgtttgtttgtttgtttaataactgctagtaaaaaccaagtcaatagctgactgagtgtaagggaggctccagaaggcaggttattgtagtatagatgtgactcgacttatgatgatgttacttcccgataaacccgtcataagttgaaatatcgttaaattgaaaatgcttttaatacaccgaatctaccgaacatcatagcttagctcagcctacgttaaatgtgctcaggacgcacattgcctacagctgagccaaatcacctggcaacacaggacactgtagagtatcggttgctggcccttgtgatgctgtgactgactgggagctgcgcttagtgcctctacccagcattgagagtttcttatcgcttattactagcctgggaaaagaccaaaattcaaaactcaaagtgcggtttctaccgaatgcttataactttcagaccatcatgatgttgaaaaatcgaaccatcgtaggttgggatccatcctataagacgagctacactgccggaagtgtaagactgctatgctgccggaagatggggcatagtggacaactgcaagtcctgacaacaggaggtcagcatctgcgacctttaacatccacattgacactaccacagtcttccaaacagagctgatgatatagtttggatgtcgtccctgcccaaatctcatgtcgaatcgtaatccccagtgttggaggtggggcctggtgggaggtgattgggtcatgggggcagagttcttatgaatggtttagcacggtccccccttggtactgtatagtgagtgagttctcatgcgatctggttgtttaaaagtgtgtggcacctcccctctctctctttctcctactctggccatgtgaagtgttggctcccgctttgccttccaccatgattgttaaattcccagaggtctccctagaagctaatgctgccacgtacagcctggagaactgtgagccaattaaacctcatctctttttaaattacccagtctcaggccgggcgcggtgactgacacctgtaatctcagcactttgggaggctcaggcaggaagatgatttgaggtcaggagttcgagaccagcctggccaacatggtgaaaccccatctctactgaaaatataaaaattagccaggcatggtggcgggtgcctgtaatcccagctacttgggaggctgaggcaggagaatcgcttgaacctgggagtcagaggttgcagagagccaaaatggagccactgtactccagcctgggcaatggagtgagaccctgtctcaaaaaatatatatatattacccagactcaggtatttctttacctgagactatgagagaatggactaatatagctgaagaattttattttatttttaaaaaacttttacgtttgggggtacctgtaaaagtctgttacataggtaaactcctgtcatgaggatttgttgtacagattctttcctgctcctccccctcctcccaccctccatcctcaagaagatcccagtgtctgttgtttccttctttgtgttcgtaagttctcatcatgtagctcccacgtataagtgagaacatgcagtatttggttttctgtccctgtgttagtttgctaaggatgatagcctccaactccatctatcttcctgcaaaagacatgatctcattcatttttattgctgcatagtattccatggtgtatatgtaccacattttctttatccagtctgtcattgatgggcatttaggttgattctgtgtcttcagaattgtgaatagtgctgcaacgaacattcgtgtgcttgtgtctttatagtagaatgatttctattcttctggtagtaatgggattgctgggtcaaatggtcgttctgcttttagctctttgcagaatcaccatactgctttccacagtggttgaactaatttacactcccactaacagtgtataagtgttcccttttctctgcaaccttgccagcctctgttatcttttgactttttaataaaaaccattctaattagtgtgatggtatttcattgttgttttgatttgcatttctctaatgatcagtgatgttgagctttttttcatgttcgttggctgcaggtacatcttcttttgaaaagtgtctgctcatgtcctttgcccactttttaatggggttgtttttctcttgtaaatttaagttcctcatagatgctgggtattagacctttgtcagatgtatagcttgcaaatattttctcccattctgtaggttgtctgcttactcttttgattgtttcttttaccatgcagaagctcctaagtttaattagatcccatttgtcaatttttgcttttgttgcaattgcttttggtgtctttgtcatgaaatctttgccaggtcctatgtccagaatgatattgcctaggttgtcttctagggtttttatagttttgggttttacatttaaatctttaatccatcttgagttgatttttgtgtttggtgtaaggaaggggtccagtttcaatattctgcatatggctagccagttatcccagcattatttattgagtaaggagtatctcctccgttgcttgtttttcccaggtttgttgaagatcagatggttgtaggtgtgtggccttattttggggctctctatcctgttcatttggtctatgtgcctgtttttgtaccagtaccattctgttttggttactgtagccctatagcatatttcaaagttgggtaacatgatgcctccagctttattctttttgcttagaattaccttggccatttgggctctttttggtaccatatgaagtttaaaatagttttttttctagttatgtgaagaatgtcgttggtaatttgataggaataacatgtaatgatattgattcttcctatccatgagcatgggatgtttttccatttgtttgtgtcttctctgatttcttcaagcagtgttttgtaactcatattgtagagattattcacctccttgcttagctgtattcctaggtattgtattctttctgtagtaattgtgaatgggattgcttttctgatttggccctcagcttggtattgttggtgtataggaatgctagtgattttttgtatcctgagactttgctgaagttatttatcagctgaaggagcttttgggctgagactagggggttttttagatatagaatcatgttctctgcaaacagatttagtttgacttcctctcttcctacttggatgccctttatttctttctcttgcctgatttccctggccaggacttccagtaccatgttgaataggcgtggtgagagagggcattcttgtcttgtgccagttttcagggagaatgcttccaccttttgcccattcagtacgatgtttgtggtggtttgtcatatatggctattattattttgaggtgtgttcctttaatacctagtttattgacagtttttaacatgaagcagtgtttaattttattaaaagtcttttctgcctctgttgagatagtcatgtggcttttgtctttagttctgtttatgtgatgaatcacatttgttgatttccttatgttggaccaaccttgcatcccagggatgaagcctacttgattgtggtggtttagctttttgatatactactggattcagtttgcaagtattttgttgaggatttttgcattgatgttcatcacggatatcggcctgaagtttctttttttgttgtgtctctgtcaggttttggtatcagaatgatgctggcctcctagaatgagttggggaggagttcctcctcctcaatttttttggaataggttctgtaggaatggtaccagctcttctttatacatctggtagagtttggctgtgaagccatcaggtcctgggattttttagttggtagggtatttattactgattccctaaatagaccgataatgattttagaagtggagtcggttttttcctggtccagtcttgggaaggtgtatgtatccaggaatttatttagctcttctaggttttctagtttgtgtgcatatgggtgttcatagtagtttctgatggttgtttttatttccgtgggatcagtggtaacattctcttcatcatttcttttttttttttttttttttttttttgagacggagtctcgctctgtcgcccaggctggagtgcagtggcgcgatctcggctcactgcaagctccgcctcccgggttcacgccattctcctgcctcagcctcccgagtagctgggactacaggcgcccgctaccacgtccggctaattttttgtatttttagtagagacggggtttcaccgtgttagccaggatggtctcgatctcctgacctcgtgatccgcccgcctcggcctcccaaagtgctgggattacaggcgtgagccaccgcgcccggcccatttctaattgtgtttatttgaatcctctctcttctcttctttattaggctagctagtggcctatctatcttattaattttttcaaaaaaccagctcctggatttcttgatcttttgaatggtttttcatgtatcaatccttcagttcagctctgattttggttatttcttgtcttgtgctagctttggggttgacttgttcttgcttctctaattctttcagttctgatgttagtttgttagtttgagatctaactttttgatgtggacatttagtgctataaatttaactcttaacactgccttagctgtgtcccagagagtctggtatgttgtatctttgttctcattagtttgaaaaaacttcttgatttctgtcttaatttaattatttatccaaagtcattcaggaacatgttgtttaatttccatgtaattgcatggttttgagcgattttcttagtcttgacttctatttttattgtaccgtggtctgagggtgtttgatatgactttggttcttttgcatttgctgaggattgttttatgtccaattatgtggttgattttagagtatgtgccatgtggtgatgagaagaatgtatattctgttggttttgggtacagagttctgtagaggtctattagatccatttggtccaatgttgagttcagatcctgaatatctttgctaatttcctgcctccatgatctaatactgtcagtaaagcactgaagtctcctactactattgtgtgggagtctatgtctctttataggtctctaagaacttgctttatgaatctgggtgcttctgtgttggatgcatatatatttaggatagttagatcttcttgttgaattgaaccctttaccattatgtaacgcccttctttgtctttttttttctttgttggtttgaagtcttctttgtctgaaattaggattgcaacccctgcttttttctgttttctgtttgcttggtagattttcctccatccctttattttggacctatgggtgtccttacatattttatctttatctatccatccagccatccagccatccattcatccgtatcatttttaaccaataaggacttttaaaagcgcaaccacaacaccattaacataaccaataaaatctataacaatgataaaatatcatctaatactcagtccatgtccaattttccctcgctatctcaaaatcgtcttcttagaaatggtctgttcaaatgagatcacatggacagaggaaggcgaacctcacactgtggggactgttgtggggtggggggaggggggagggatagcattgggagatatacctaatgctagatgacaagttagtgggtgcagcgcaccagcatggcacatgtatatgtatgtaactaacctgcacaatgtgcacatgtaccctaaaacttaaagtataataataaaaaataaaaataaaaaaataaaaagtgaaaaaagaaaaaaaaaaaaaaaagaaatggtctgttcaaatcacaaaccagattcagaaacaatagccatacattacattttattaatatgtctcttaaatttcttttaatctattacagtctttggaatttttatgtcttcgtttatccttccaattattaaaaaaaaagtatttttgtattcattgaatagacaatgcttgcagaaaagtaaaaaaaaaaaaatttagtacaaaaaggtacatagtgagctgttccttagtctcccttcccagaagcaatgttaccacttttgtacaaatagtctctgcctagacacacatgccagtccctaaggtggctgtaacaaggtggttaagagtgagaacatgaattcaaattcctattatgccactcactaagtataaatcttggtcatggtacatgcctctgtgcctcagtttttaataatggtacctacctcatagggctgttgagagaattaaatcagataagtgcttaaataactattaatatttattattattcacattcccttttggcttttttcccaaatagcagagtggtgcacatatgtcttcatttatttggcttgttttttcacctcacatcacattttgatgaataattccatacatgttgttatagatttgcttcattctttgtaatcattgactaatattccattgtatgaatatgctactgctaaacatgtacgttatttccaacctcttattatcaagaaatgctgcaatgaatatccttgtaatactttagtggattcatgtgcaaaaatattcataggataaaatcctgaaagttaaattgctgagctaaagggtatgtgcattttaatgctttatagattgcccagctgcctcaaaggaggttataacaatttacactcccaagaaaaatgcacaagggtccccatttccccataccctagctaacacaggatattgctaaatgctttcatctttgtaaacatgatgtattgaaaatggtatctcaaagttttaatgtgcatttttctgattgtgagaagataaaggaaatgtagtacaactaaacatcagcagtcaaatgacctggccatgactcctgagtgaggacactggtaaacaccatcaggatccaaacacctctgtatttacgaagaggatgctccctattggatagcactaagcttatttcatgtatgtacatatgtagttagttaattacatccagcggtggcaaagggcttgttctgacccaatgaaactttctctcctggcccccttccagcatgtggtcaggagtagagtgttgtggccatgaggcatgcatttgtacagatgactacttactcctccttgaaacatttttttccatttgcttccctgctgtctcactcatgggtctgctcctaattcacaaatcactcttttcccagtcttcttggttgggttttctcctcttctgtgcttgtagacatgggggagccccagggcttctctcttgaactacagcttctccctgggttcatctccttgggatgtctgttccaatgggtttaaatactagggctaggactagggagaggtcattgaggcacttagcacataaagtttaaggaaacattctttatcaggcccatgcaagtgcaggactggccctggagggtgactaccaccttaccttttccaccctaggcaccttgtttgccttaccctagccccagtcctctttaacaccccagtcttctccctggacctccagaaacataaatcctatttgacatttctacttggaggttttaaggtaactcaaacgtaaaatatctaagacagaactcttgcatcacttcccatcctggggcccaagcctgtctcttctactagtctatctcagttaacagcatcaccatttattcagttgctcaggacaaaaaatttgaagtaatccttgactcttctttttttttttttgagacggattctcactctgttgcccaggctggagtgcagtggtgggaccttggctcactgcaacctctgcctcctgggttcaagcaattctcctgcctcagtcttctgacctcgtgatccactcgcctcggcctcccaaagtgctgggattacaggcgtgagccaccgcacccggcctggattcttttttttttttttaaacaagtcctatcttccatctccaaaatgtatcccaaatctgacaacctctcccaccgtaggccagcccccatctctcccctctgaaaatagcctcccttagatctctggacatttgttcttccccacccccttgtgatcactattcagcattcagaatgatcttttaatattatgaaggagactgtgttcctctcctacttaaaattctctagtggcttcctaataaatttagaataaaaagccaactcctcgccatggtcaccaggccaggatccagtgggtacaacaatctgttcccagcacaataatcccacttctgcctccccaccattcaccaggctccactgcactggctcattcctgcctcagttgtgcttcttttccctggaaagttctttctgtagatctttaaagggtgatttccttctcaacattcaggtgtcagctcgtttcactttcctgaccatgcccatccactcagagatcactcaaaatcccattaccctattttatttctccatcatatgtatcactatctgaaactatcttgttgttgatgcaggctattttcttgaccccttcatgggactcccaacaggggtaccccatttactcagcctgccctgctcaacctcttgcaggagggagcacacgagtgaacgagtgcaggaaccagctggctgctttagtgctgtgaggagtaaactccatgcaggccctgcagcagcaaccaggtaggggtgcctgcaaccccagggccccagagggtgtgttacaatgctctcgtagctctgccatctgtggacagcagtgtgttgtcagctcagtgggccctttgcttcatcatgtagggtggctgccctctgcctgtgagggcaaagggccagggtgacagtctttttgggtacccacaatttgtgcatcctgaattcttgtttggtgcccaagaagaatggggtcacacagatgaactgaaggatggtgaatgcagagaattagcaatgaaagtggctctcagcagagagagaagctgaaaagggaatgggaagggcaggtcactctcccctgaagtcaagtcacatctctccaatgtccagccaccatctctgaagtcaagtttcctctctctgatgtccagccacttctcctctctactggctgagtctggggtatttataggcagaggataggtggtggggcaggccatacataattttggaaaaggcaacattctattggtaaaaagacattattcataaagaaccaattgggaaagagcgggcacacagggatggaagttctcactttgggctgcaggtttcaggcttttcagctcaaaagtgaggtttttccagggacctgccccgtctgcctaaaatttctacacttctgtcattgataccgctggataacagctctcctataaagttcaggggcttaaaacaaaaatttactaattcacccggacagttcttgatagggtctctcctaactgttgcagttacatagcaactgggttggagtcatcttttctgggcttgacatccaggacagcttcttcccttgtgtgtctggtgcctcagtgctcctccaggcagcctttctctccagaagagtagcctggacttcttggcaactcaagcttccaaaagaaaaaaaagcagagactgctggttctcttatcaaacaggcctggaactggcacaatgtacttctgctgccatattcaggaggtcaaagcaatcgaaggccaatccaagttcaaaggcattggagaaaaatgagaagtgtcacttaaatgagaagtgacacatgcgtaaaagggggaaaagcattgattgtggccatttttggagataagctatcacgtttatttgtttgtttgctttctaatggtctgtcttctcccattaggttataagctctgtgagacaacaggaatcttgtccatcttgttttatggctctacttccaacacctagaataatgcctggcacatagtaggtgctcagtgaataacttaagcacttgatacatgtttggggaactaaaatgaacagaattaaacttccccagattggtcctgccagatttgctgatgccaagcatgctgatgcctcaccagatgaaagaagccctaaaatgtagggtttcgctttctctgcaaacaagaaaaacttgccctgaacacaaaatctagaaatagatttggcgtgttttctacattgaaatatttcccgtagtaccagaaattattttcccacagctttgtgctacattaaaatattgaagttgactgaaaatatctccattctttaatcttggtgtagactagaaacaatttttttgtaacaaagtaaatatgaaaacttcctaatatttgaactccccagatatccccagatatctccaaacttaaaatatcattgcaagttaagataaatttttttaaatgactaccgagaaaggtcattaaaggcttggttattaaaatgtacagatttgggttataaagccagaacttatttgtttaaatcattacatatgaccaagcacagaaaataaattacctcaaatctcctctttgctaatttttactggtaaactctataaaatgatcctatctttaaacctttttgtaaaccccttataagttagtaagtgagaatgtattcatcagaaggattttagtgatgtttgaaattaaaaaagagagatttgatttttaaaattatacttgcagactactgctaatgaaacttcttctaaccctagttttgtcttatcttcagtttttccagatttgctcaaagcaatcccagtgagcatccacgtcaatgtcattctcttctctgccatccttattgtgttaaccatggtggggacagccttcttcatgtacaatgcttttggaaaaccttttgaaactctgcatggtcccctagggctgtaccttttgagcttcatttcaggtaagtacaaaattctacctctgaagacaaatgtgcttttcaatatgtcaaaaagaccgtctacctaaatataaagttataatcttaacatatatacatggatgcacactgtagtattatacataataacaaaaagtgtggaaataccacacttgctcaacagtagggaattcaataaatactttatggacatctatatgaataactgtgatgctgacattaaattatatttttgaagatgtaatcaagaggataaacgcttgtctcaaaaagttacatgggaaaagcagtatgtaaacttatataaacattgtgaacctaatttgattatatatataaaatatagggaatatacatataaaatacatatatgtatatatgggggctatatatatatatatatgaaagagatagatagatagatagatagatagatagatagacagacagacagacaatacagactccaatctgttggtcgtggttgtctctgacccatgacactatgggggacttttatttttgctcatacttttcaatatttcttagtgttcaataatgtgctattatttatacataataataaaaataaataaatggcatcaaaaaagagtaaagggccagtgttccgcccacatatgagcagccatattcaagcctgtagacactttgtgtagcctaatgctaggtgtatctgggcaaggataaactctaaagccagaaattagttcatcaataaacatgtgctactcaatagctagggctgatggaaaagaatataaaacccagtctgtgccaaatggtgcttactatctgcaagtgggagaaggagaaagacgagaaaatgaaaaatgtgtgtataatttatatgtagctgttctgtaggagatctctgacttcaccccattctaactttgcaaaaagatccaacactttgtcagattcctgggaggcaagtaattttattgatggtttcatggagggatacagaacgataacaactcacacaaagcaaacaatgtaatgaaaatctctattcgactgtttctttttctcctgaagttgccctttggctgccagctaccaggcaccaggctcaaggtactttcttgctcttgacactactcccttctctcatacaattcaaccccaaccacaaacgtgtatagatctctctctctataaaacaaaggcctgtagttaacaggaggtcacttgcagtgtagcctctgttcattgttacttgtgcacactgcttagggtctcaccccatccacattctgctaatcacattattcacccatccaatgtagatctctccagtggagattctgctaatattttctttagatttgtcacaagtatataatacagttttaaattgtacagatgattatcctataacagaagagtctaagccttttacatctttgtatctctaacgaaagcattcagcatgaagctctgtacacagcagacaattcaatatgaatttgctgacttgaaacagcaagcctagaaaggagatgttaacttggtcacttagacagaacaggtttcagcaatcagaattcagatgacatggaactggtagaacaggcgctttgaagcaataggacatgagccagtgaggagagggatggaatatcataaacaaaggccaagggctttgcaatcagagctgaagagccaagagcacaggctcagggtgtgggcagactgaatgagaaagtgattcaatcacatgtgaaagtccagatgagaagagagagttgggattacttctgctcaccaaacatccaaaaccaaacaggtggatccgggtggtgtgctgttttactgatgaccattacacagaattttaacagaaggaatgtaaagcagtggttctcaaactggagttcccagatgagcagcgtctgcatcatctggaaacctgataaagcagcaaattctcaggccctaccccagacccactgaatcagaaacttgggggtctgggggaagatggccatctgtattttaacaatctcccttcaggagattctgaggctggctcaagtttgaactacaggtagttggttcaacaggtgttggtggactgacaaacaaaaagagactccgaggtaactccaagatggtaatgtcagaaagcagctaccacccctagggcttgggggaaccaacaaaagagtttggcattgccagaacctagaatcttgaggagaggccccagagcattgtgtctcagaccttgaggacttggcactgggacaccatgaggggtttctgggtgtgggaaagggctggaaactccccagttgctgccaccagggagaactacaagtgaagtggaaggtgtgggcctttctcccttttcttttctcgtcttctctctccccctggtgctcatgtttgacagaaaacagctgaaaaggcagaactagtttggggagtcttgacctggcatcataaagcagagaaaagcaaagctggagtgaaggtgagacacaacagctcattagcagcaacagccgtctagcgctccagcttctgaatgaaattctgaagaacagcgcacttggaagacaaattatttgacagttctgacagacgaccaaactaacagcatttgaaaagcaagatgactcagagaatacagaatttaatccaaatcccagatcctatctctgcctttggccaggcctaatgcaaggagaacctgagcacacaaatatatgcaggaatgatcaggacctgtgcctgcattctattctgtctcacccaccttcaaatttgttgtaaaaacatgggctcaataaaggtttgtgaatcagggaaggaagagaaggggagaaaggaagggaaggagccagctccagatctgtgtcttgcagaggataaaggccagtgtttttagatcacccagtgtttttctaagcccccaatacttattttgaaatatcaaaatgttcaataactaaaaaaaaaaccgttacaacaataaaacatgtttgagggtcagatggactggcagtttgtgacctctggggataaacaggtcactttggaatcacagacttcctcattccccttaaatctcatatggtacccagaagcccttggaactttggaaggtgtttattcacagttgtaatgtccatgcagaccctggctctaagacccaattgtgtaagggtaggtttgtagcccttatcccaaacattctaagtgtgagccaatgcgtcacacactcagaggccagagactgtattggggtcctttatttcacgtacgagtcacattccattaagagaccccagaagtcagctctcttccactgactggttctcttcccttgtttctcttgccaatgtgtgctgcccaggtggcagtgctcactgtcagcagagaagaaaaatgctttcctccttggacctcttttctctttttctcctccctactcacattcaggttccctaagcttccccgctccttgtgctgaagtcattctatggtcatttcttcaactgtctacttccctgctggatgggcacccaagacttggcatcctggggcatgtagaaaggggaaagggaagggaagggaaaagaagtcctcccaattgtctatctggacctttccacactgcccagagtactgctatgggcatctccttatgtctcccgatgtggtgcatgccagaccctgcaggtagaaaaggaaagaaagcaacccattggaccaggccagcaaaggcttcagtcacacagctggctcatacttatggcttcatattctgttgcctcttgaaccagacatttcttccactctcataacctccagtttagctcgtattcctcagcattctccatgtaatattgttgcatgaaacccatgcaagtcagccaatttgctctttctcatcttgtcatttataaattgatgctgagaagtctttttcccaaggtttttagtaataccttcatcatcccccatagttcattttgggcagtgattcgcttctttgactgtacattagaatcatctgaagaactttctaaaactactgatctcaggtctcacacaacactaattaaattatagtctctggtggggtagggcttgggcactgctattttaccttaagctctctggagtcattctaatttgtagccagtgctaagggttgcaatataagtgaatatatttcacgtatttgtcaaacattgactgagtgcccattatgtgccagccattataataggcactggtgatcccacagtgaatcaggcacacaatgctgtcttcacggagcttgttgtctagtgggagagtcaaacaaaagtgtatatcaataattaagtgattacagattgcaataattacaataagggtgataaacaggttgctataatatacaatagtattgcctttcaccagacatttcttaaagaggtaaatcatctatcagacaccttttaaaaatctcatctaatttcaaaagtgtacataaataattaagtgattacagtttgcaataattacaatgagggtgataaacaagttgctatgaaagagaaagatagcagagatctggctttgagatggtggtcagggaagactgctccaatagctgagttctaaagctaagaaggaactgagaaccttcacagaacgtcccaagtagaagagaaagcacactgaagactctagggaaagaggtctgcttgttgtaggaaccgaaagaaggccaatgtggctaggtgctgggtagtgaggggaaatggcacaaggaaaaaatgaggttagagagatcagttgataccagttaatgttggaccctaaacattaaccatggtaagtcttttagaattgattctaattgcaatgaaaaccttttgaaagattttaaaaagatatctgatagctgatttacctctctaagaaatgtctggtgaaagacaataccatcacattggagatggaaaaagatgaatggattctaaaaacattctgaaagtacattcaaaatgtttttcaggtagcttatgcaactaataaatagtggtggcattctgggtaagacaagggaggagcaggcttgcagtttagggcaagaaaggggtggggagaagagctcagcactaaaatcatgtgttccatttggggcacatcgagtctgagttgctatgagaccaccaagtggagatgccaagtaaatagtcagttacatgaatctggagttcagtgaagaggtctagaagaaagatgtatatttgggcattattcggatatagatattatgtaaagcaataaaattggatgagatcacctagggagagaatgcacatagataaaaactgacctaggaccacttcatgtctaaaacaccaaaagcaatgtcaacaaaagccaaaattgacaaatgggatctaattaaactaaagagcttctgcacagcaaaagaatcagagtgaacaggcaacccacaaaatggaagaaaattttcacaacctactcatctgacaaagggctaatatccagaatctacagtgaactcaaacaaatttacaagaaaaaaacaaacaaccccatcaaaaagtgggtgaaggacatgaacagacacttctcaaaagaagacatttatgcagccaaaaaacacatgaaaaaatgctcaccatcactggccatcagagaaatgcaaatcaaaaccacaatgagataccatctcacaccagttcaaatggcaatcattaaaaagtcaggaaacaacaggtgctggagaggatctggagaaataggaacacttttacactgttggtgggactataaactagttcaaccattggggaagtcattgtggcgattcctcagggatctagaactagaaataccatttgacccagccatcccattactgggtatatacccaaaggactataaatcatgctgctataaagacacatgcacatgtatgtttattgcggcactattcacaatagcaaagacttggaaccaacctaaatgtccaacaatgatagactggattaagaaaatgtggcacatatacaccatggaatactatgcagccataaaaaatgatgagttcatgtcctttgtagggacatggatgaagctggaaaccatcatcctcagcaaactatcgcaaggacaaaaaaccaaacaccgcatgttctcacccataggtgggaattgaacgatgagaacacatggacacgggaaggggaacatcacacactggggactgttgtggggtgggaagaggggggagggatagcattaggagatatacctaatgctaaatgacgagttattgggtgcagcacaccagcatggcacatgtatacatatgtacctaacctgcacattgagcacacgtaccctaaaacttaaagtataataataataaaataaaataaaataaaaaaacaaaaattgatgtaggaccaattcctgaagaacactgacagttaattttttggtttaggaggaggagaagccagcaaacgacactgagtagcaatatccaaagaaaaagaggaaaaaggaaaactgggagattatgagtgtcccagagggaatgtttcaagattaccatcagcagtgagctttgtgtaaaggtggcctcctgtaatagaggtgcgggcaggagaaggcagaatagggaaaagggggtgaaaaagcttccctcaagatttataatacagtggaagagagagacagagagagagaaagagaaagagagagagagaacttaaggaggtagaggaagagagagaaccaaaaaagagggagctgagtatagaagcaattagattcatagtttttagttgcggcagtgatatttgagtgggggccttttatatattccattctaggtgtttcccagttgatgggagagggtcttacctagatctgcatgtaaaagggagtaggccagctggcagacttgacatggatcagtggtagaacatcctagcagttctgtgaatactctctgagaatgacatgaaaggtattggttcaggccttttggaggtgataaaaaccaccaaaatgtggacttattgcaaattgtatttgttaccatttgcaatgattataattattctcttatatataggctttcttacatatagcttctcttacacatagcgtcatgagttatgccttctcttacatatagtgtctgctatgagttatgccaagcagggcaaacaaaattgctgcctttctttaaaaagaggacgctcctagtatgggcctaattaattatgataattacagctatggcatggaacataagcacattcatatacacaaagacaataaaataaagaacagttcaaaaacagaacagttacattatatatcagtttcagtatgaataataccctggactctgaaatatgtctggggcacattattctgtaattggtggtgaaaaaaaatctgcatcttatctctacgccaatccttatgaaggagctgtttttcaggagttcgagaaagagacacagggatgtccagtcatcaaagccgcagagcctgaggaagaataaaggatttgtggcaggaaaacccagtaatgaatgtattctgctagtttctcagcatagaacttagaaaagaggccacagaaggaaaagagaagtaatgttagacagctgatgttggcaatgggcaaagaatttcattctcatatgcagggcagtggctaaaggggcagtgttgtgaggaatcacattccaggtcattcatgtccagggtgtggtaggaggactgtgtttcatttattttgtacatggcccagctatgaccttgtgcaaggaaatgcttaatcattttctatcacagttgcaaagagattcttatcctactcagaatgtacgtcttctcttctgtttcatttacagtcacaacccaagtccttgctttgacctccaaagcaccacttgatgtatccacttcagaaacacacacagacagctcacctctttctatcccttaccttcctcccctcttcactcaaaccacctacttcctttgcattcactcttccttcagcctgaaataatcttcctccaaatatctaccttctcactccctcacttctctcaagatacacttaaatgttatattccctatgaggcctcccctggccatccctccccagccttcctatcccccctctctgctttattttattctccttaatatatatcacactctgataaaccattgaatgtacttatcaagttattgcctctctctccctttccattgtctccatcactgagagctctgtgaagaaaaggatttgtacctgtttcatttagtgctgtacccccagttcccacaacagcgcaacaggcactcaataaatagttgttgaataagtgaataaaacagaagtagctgcatattttctggtaacaaatgatattcttctgaaaatgtcatattttcagacatatttccgaaaataaattcaaattagataaacattgtatttttagaccatttcttctttgcattaatcatccttctcaataatataacatttgtaaaacttaggttagatatgggctcttcaactttccattacagaagataaagtgaaaaggctagacccaatggtgttattccttcatctacatctatcctttggaaacacatgaccaaattgcttgccatcacaatctcaaaatctaccctttggtattaactcacttcacttgtccctctgtccctttttagatggtagccatcggtctctggagcagtgtagagtcagaacaacttctatttggggaagaaatcattgctggtgaccttactttcaattactaactttctagtgacatttacataattttagagaaaattaacacctacacttgtaaagttgtggctttcccacacctatttatcatctctcaatattccttgaaaaggaaattatcaatttatcattctatattggcaatgaaatgcccctaatatctgtcacctataagacaattgaagatgatgtgttgaaagctttctgaaaatgctgatcattactttaaatggaattgaaattccagtttattatttccaaaaatatgatcttactgatcataggataacatttcataacatttcagagatttcttccccttcgaggagccaaacccataggacctctggactcccacagatcctggcagggagttcccactcataaaagcacaggtgccctcagagtcattcagggatgaagaagcaaccctcattggccatgtcctacgttccccatatagtaaggactggaggagaccagtgctcaattctgcagtctcagacagctgtcagaggagagtcatgaatgtgcagtgtctagcacattacaaacgtttgttaattgactgatcattcatggtgtgacagccctataactcagctatcctattcagtcagaaattaactcagtaatcaaagtcattaaaaggaagaaaaaaaaaacctacagtaccagacagatggtggggaaatcagacagatgaaaggaaaaatggctgtaggtcattgagtaagacactgggcagcaaaacctgggccttgtgcctggttatactccacattatagctccagcaaggtttggcaggatttccacagtcctggcttattctaacctttcttgggagcaggagcagtgttggtcagatagacagacacataaggaatctgtccaactggcaccgtgtgaatttgggctcttggtgtacatggataactgggaaaaagaggagagagacatgtaggactgatcctaccgtttgtgaagtcttgggcaagagtatgaatgaaaacccacttctcttcccctgcctggctccactgcacacagtaaagagcctcaagcataggtgtgtggacattgcaccatgtatccaagctctgaccatgcctcttgaaacagctattcctcagccaccctctgaccatgggaggaatgacccaggagaaatgaccacataggtcttgaaaatgggctcagggctatttacgaagtcaattccggggtcccaggagtatggactaaaatgtgagtcaggcatgccagatgggtatgttctattgacttcaaggattcctcatgctgtgggaaggaacctctccagaagagagacagagcagaaccctctaaatgtggggcacaaagcaggagcccctcttgctggattcaaagggtcatactggaagagtgtaggttgagtcttattctcacatcactcatatcacttacacacttcttttatagccttagcagccatgccacaaagagaaactcttcatgcatatcttttggtccataagtcataaatagttatccttgatcccatgtcttttttagagccatggacagagagaagcaaaaatataccaagttcacactgagttgtctcccttcatatctcttagcagtcactgaaaggttatgagactcaggctgggtttctatcctctgtccctgaaacgacaacgttgacctcgtgatcaaccctagaatccagagcaagatctcagactgtcctctctactaccagacagcacactttgttttgggggctgtgtgcttgaaatattagctatggcaaaaggctttgagtcttatgacaccccaagtaacttttactttaggaatttgaaatacagccttgctgtaatgctgtctccttaacaaagcagtacctttgaaatatttaacaacttgaaaaggaaaccgagcttgaattttcctttcaggtgctcaggaaataatgtttcacttctgtctgaaattcaccatctcctcagacaaagaaggctcttatggtaaaaggaatggcattttctccacaattttcgaataaaagataaagagaaaacagcactgcagcctttttgttaggatctaacaataaagaaataatacggttttgccaggggagagctctggttttaagctcagaatacaaaaataggctgacaaaattttacaaaggaatattctcagctaccactctgaggatggtagaaagtgaaatttcaagaaaattatattatttgattatttgatgatgattaagctgattggccagtcctatgtgaaattctaaagtagaagaaatgtgatgttgtcttttctgctcacctctcccctcattcctacccccaaatctctgcctctaccccaaacccagcctgacctttgggaaaggaatgggggctgtcacttgcaccgtagctcctcctgcctgcagtactctccccccacagtccagcctccctctgctcagctaacttttcctatagctccttctggctacttctaaggaaccttccataatgctgcccaccctctcagtaacagcccctctactatcccttgattacatgcactgtaattggttagtaattgattttatgtcctctgccaaattatactccatgagagcaaaaatcatgagtattatctttaatgtttaaatctccacaactatcccccatataagtctagagaataaatgaatgagtgaattaatgaatagaaactcaagccattatgttgccactcctaggatatttggattaactttaactgaagagtaaaaagcatttacctgtcctaaaggagacataaaattagtgggagagtatttggagaaaaaaaagacactgtaatacattcttttgtgttgcctaccctgatgtagtcaggtgtccctgatatggggtgggctgaggatttgaaataaaatacctaatttgacattgtaagtggaggaatcaggatttgaaaccaaattggtttgacctaaatcaagctattatgataaggacttgcaagaaaaaaggaatccataaaaaccatatgaatagctaccaattagtaagcatttatatgtgtcaattacaaagccaaatgcaaatcatgctttatttatattagccaccttttatagatgaagaaattgagacctgaatattaaaattgcctacttttacatagtaagtaaaggaatcagggtttgaacccaaattggtttcacctaaggtagaaaaccatcccagcaagtctcctattaactggaaccctattgtggtggcctgagatataacagtagctgtggaagcgctgtagagtcctggccatcctatgtgctcctgatctggtccctcctgccacctgcttctgctccctgtgccatccacccatctggaagtctcccagtgtccatcttcgggggagacactcaccagagtttccagcttccagccagtatggagtgcccctgtcccacagcaatctcaccgaaatcacagctacatctgttaaaattaggctaccaatgagtgatagatgagggggaaaaataataatagtgtactaaacaaaacaaatgtttatttttctcacacataaaaatctagaggttgaagtccagggctggtccagaggctccaaggatctgggatttagactccctctttcttgtttttccacagcatatggcttccatttctggggccacattggtccaaaatgtatgctggggctccagccattgcatccatatttcagccacaggaaggaggaagtggggaagaaaggacaggcccctaatacctgtatagttcaagaagactatcccgcccatacttcccaaccacccttagttgaacaatgctgtcttaattcaagacactcacatgtctagccaaaaatctgaattctgttacaaacaaggagaatagagatgtgcgccacctcaatacctcatccatagctaccttttcctttgtgcagctgtggccaagtgaaagctgaaggagctgtggtaacccttctgaagggaggctggggcctttcacaagaggctgcatgattgacatttatcctgcatggcctgtgaagtacagagaaatattttctcttgaagccacatcatagcagtggctgctttgtagcctgattccaccattatgcctttaaagtgcctagcaattcagccttcacatcatgcaaagaggaatatctcccagtctttgtaagatcagcttaattctaaccacctccttacctcccactgcactcctacacgcacacacaaatcttcttcactcagagcagaaccataacccaagccctaccacctagagactgaagaatcaggctcatgattacaaatatgcaataattttttgtgtggataatgtcaatggggatgatggtaagagaattccttggtttacacattgaccctcttccctgtcccttacaatcaggaaatatttgtcccaacaccttgtttcttctgttgcaggctcctgtggctgtcttgtcatgatattgtttgcctctgaagtgaaaatccatcacctctcagaaaaaattgcaaattataaagaagggacttatgtctacaaaacgcaaagtgaaaaatataccacctcattctgggtcattttcttttgcttttttgttcattttctgaatgggctcctaatacgacttgctggatttcagttcccttttgcaaaatctaaagacgcagaaacaactaatgtagctgcagatctaatgtactgaaaggcaaacctttctataattttacaagggagtagacttgctttggtcacttttagatgtggttaattttgcatatccttttagtctgcatatattaaagcatcaggacccttcgtgacaatgtttacaaattacgtactaaggatacaggctggaaagtaagggaagcagaaggaaggctttgaaaagttgttttatctggtgggaaattgcttgacccaggtagtcaaaggcagttgactagaatcgacaaattgttactccatatatatatatgtgtgtgtgtgtgtgtgtgtgtgtgtgtaagatgtcttcctatcaaaaagatatcaaaggcacatggaatatattttaataaaaacaaataatatctctaatatatccacacatttgttgccagatttcagaaaactgagctgcaatcgctttcctaaaacagtagtgtattaaatgaacatctataaaatgtatcaacacacattttaaaaaatttgtttaaagtatactcttaggccaggcgtggtgactcacacctgtaattccagcacttcaggaggccaaggtgggaagatcatttgagttcaggagttcgagttacagcctgggcaataaagtgagaccctgtcactaacaaaattaaaaaataaaataaatataaaatataggctttaaaaaagcatagtcttattaaccatgtctgttggtcaaaatctgcaaactctaaaagaagaaaagaagaaaaaaccaagcttagggtatttttcctcccgtgcctgagtcccaattacattcacgacagtactttcaatgaacataattgttaggaccactgaggaatcatgaaaaatgatctctgcttagtacatttgatgcaaaatgacttattaggggctgtttttctagctatagtgtctcgagtactaatatgcaattatgaaaattatattaaatctgggattatgacggtatcactgtatcatcttggtcttgttctggctgtcaccaagcatgacccaggtcaactttttttttcccctgaattacccatcaaattgatctgcagctgactaaaggccacagctgagcctggaactgacccttccttcatcctcaacctgctgtcctccagaaagcaccaaggaaaaagcagagaatgacagcaaacagatcactaggcctctgaccacaggtgctgagtactcagcagccctcatataataggtttgaaagtactccttaaaataaaacactgtttccctttggaactatttacaaggatgaaacaaccgtatacctgagaaataacttgctctggtgtcaattcgctattcgccagcagacatcagaacacaccgagtttccagatgctggtttttccccttaaatcaggaaatacacctggacaatttctagaagactacaattcagtctagccacaaaggggattttttttttttggtaacaggctagagcccggttctgtaagtctttagctgaaatggtccagtacaaaagcactggaaatgagtgggctaggaggacaaggaccgtctcctgcgtgaggagttggttggaggtccccaaggccaggtaccccctgcactcttattggattcctctctgtcttcttggagttttgaaaaactccttcgaacaccaggcttttttctttagaaaacaagtctccaatcgttctctgttccgtagaaagagaaagaaaacctggagcagctgctgaaaaatctaatgaggaactaagaggcaaacccacca

SEQ ID NO: 48 - protein, 760 aa, Homo sapiens
MSPKKVQIKVEEKEDETEESSSEEEEEVEDKLPRRESLRPKRKRTRDVINEDDPEPEPEDEETRKAREKERRRRLKRGAEEEEIDEEELERLKAELDEKRQIIATVKCKPWKMEKKIEVLKEAKKFVSENEGALGKGKGKRWFAFKMMMAKKWAKFLRDFENFKAACVPWENKIKAIESQFGSSVASYFLFLRWMYGVNMVLFILTFSLIMLPEYLWGLPYGSLPRKTVPRAEEASAANFGVLYDFNGLAQYSVLFYGYYDNKRTIGWMNFRLPLSYFLVGIMCIGYSFLVVLKAMTKNIGDDGGGDDNTFNFSWKVFTSWDYLIGNPETADNKFNSITMNFKEAITEEKAAQVEENVHLIRFLRFLANFFVFLTLGGSGYLIFWAVKRSQEFAQQDPDTLGWWEKNEMNMVMSLLGMFCPTLFDLFAELEDYHPLIALKWLLGRIFALLLGNLYVFILALMDEINNKIEEEKLVKANITLWEANMIKAYNASFSENSTGPPFFVHPADVPRGPCWETMVGQEFVRLTVSDVLTTYVTILIGDFLRACFVRFCNYCWCWDLEYGYPSYTEFDISGNVLALIFNQGMIWMGSFFAPSLPGINILRLHTSMYFQCWAVMCCNVPEARVFKASRSNNFYLGMLLLILFLSTMPVLYMIVSLPPSFDCGPFSGKNRMFEVIGETLEHDFPSWMAKILRQLSNPGLVIAVILVMVLAIYYLNATAKGQKAANLDLKKKMKMQALENKMRNKKMAAARAAAAAGRQ

SEQ ID NO: 49 - DNA, 2283 bp, Homo sapiens
  source 1..2283: mol_type = other DNA
atgtcacccaaaaaagtacaaatcaaagtggaggaaaaagaagacgagactgaggaaagctcaagtgaagaggaagaggaggtggaagataagctacctcgaagagagagcttgagaccaaagaggaaacggaccagagatgttatcaatgaggatgacccagaacctgaaccagaggatgaagaaacaaggaaggcaagagaaaaagagaggaggaggaggctaaagagaggagcagaagaagaagaaattgatgaagaggaattggaaagattgaaggcagagttagatgagaaaagacaaataattgctactgtcaaatgcaaaccatggaagatggagaagaaaattgaagttctcaaggaggcaaaaaaatttgtgagtgaaaatgaaggggctcttgggaaaggaaaaggaaaacggtggtttgcatttaagatgatgatggccaagaaatgggcaaaattcctccgtgattttgagaacttcaaagctgcgtgtgtcccatgggaaaataaaatcaaggctattgaaagtcagtttggctcctcagtggcctcatacttcctcttcttgagatggatgtatggagtcaatatggttctctttatcctgacatttagcctcatcatgttgccagagtacctctggggtttgccatatggcagtttacctaggaaaaccgttcccagagccgaagaggcatcggcagcaaactttggtgtgttgtacgacttcaatggtttggcacaatattccgttctcttttatggctattatgacaataaacgaacaattggatggatgaatttcaggttgccgctctcctattttctagtggggattatgtgcattggatacagctttctggttgtcctcaaagcaatgaccaaaaacattggtgatgatggaggtggagatgacaacactttcaatttcagctggaaggtctttaccagctgggactacctgatcggcaatcctgaaacagcagacaacaaatttaattctatcacaatgaactttaaggaagctatcacagaagaaaaagcagcccaagtagaagaaaacgtccacttgatcagattcctgaggtttctggctaacttcttcgtgtttctaacacttggagggagtggatacctcatcttttgggctgtgaagcgatcccaggaatttgcacagcaagatcctgacacccttgggtggtgggaaaaaaatgaaatgaacatggttatgtccctcctagggatgttctgtccaacattgtttgacttatttgctgaattagaagactaccatcctctcatcgctttgaaatggctactgggacgcatttttgctcttcttttaggcaatttatacgtatttattcttgcattaatggatgagattaacaacaagattgaagaggagaagctagtaaaggccaatattaccctttgggaagccaatatgatcaaggcctacaatgcatcattctctgaaaatagcactggaccacccttttttgttcaccctgcagatgtacctcgaggaccttgctgggaaacaatggtgggacaggagtttgtgaggctgacagtctctgatgttctgaccacctacgtcacaatcctcattggggactttctaagggcatgttttgtgaggttttgcaattattgctggtgctgggacttggagtatggatatccttcatacaccgaattcgacatcagtggcaacgtcctcgctctgatcttcaaccaaggcatgatctggatgggctccttctttgctcccagcctcccaggcatcaatatccttcgactccatacatccatgtacttccagtgctgggccgttatgtgctgcaatgttcctgaggccagggtcttcaaagcttccagatcaaataacttctacctgggcatgctactgctcatcctcttcctgtccacaatgcctgtcttgtacatgatcgtgtccctcccaccatcttttgattgtggtccattcagtggcaaaaatagaatgtttgaagtcattggagagaccctggagcacgatttcccaagctggatggcgaagatcttgagacagctttcaaaccctgggctggtcattgctgtcattttggtgatggttttggccatctattatctcaatgctactgccaagggccagaaggcagcgaatctggatctcaaaaagaagatgaaaatgcaagctttggagaacaaaatgcgaaacaagaaaatggcagctgcacgagcagctgcagctgctggtcgccagtaa

SEQ ID NO: 50 - DNA, 314551 bp, Homo sapiens
  source 1..314551: mol_type = other DNA
cagaaactatgagggcagaacccagcaatctgtgctttctttcacaagccctccaggagttgctgaaatttaggaatcattgccccaaaaagtggccctcataatgatgccaggtaaggaaagacaacattattacctatgtgtggtgtgttaacattctttatgaaacatgtgtgaagacctaaatcgaagactttctccatgagatattccctaatcacattagtgaaataaaactatatttcctctacttttctactgctacagaaatctcccccagttaggatagtcccagtttcctatttatctttgtttttcttgcagtgcacagcatgtcacccagtaattgataagtttttttttttttgagacggagtcttgctctgtctcccaggctggagtgcagtggcgcgatctcggctccccaagtagctgggactacaggcgcccgccatcacgcccggctaattttttgtatttttagtagagacggggtttcgccgtgttagccaggatggtctcgatttcctgacctcgtgatccgcccgcctcagcctcccaaagtgctgggattacaggcgtgagccaccgcacctggcctaattgatatgtttaaatgttaaaattaaatgcaatgatttcctaaaataaacaaatgtgggacaatttattgcactctgttcaaattcccattttgaagtggaattcaaacaaacatgacagtaaagggggacagtgagcacagggacaagagaaaaggagaaagggaagaaatacagagaactagataggaggaagtgtcaaagactgatgggtgtaagccacctttacctctggatattggttttcctttgaattgtggtatgtggtcatattgcttattagttataacatacagctgtcagaagagtttttcaattaaaatttcaaatgtaatattaaaactgtttggattccttcctactgggcactggacactgtctgtggagctgctggaacagcgctgaatagggtcatattttaaaggaactcagcctagtgcagtttctcaaccttagcactattggcctttggggcctgataatccttttttgtgaggggctgtcctgtgcactgtaggatgtttagcagcatccttggcttctactcagtagatgacagtatcaacccccttccccagaagtgacaattaaaaatgtctccagacttttccaaatgtcccctgaggagcaaaattgtctccagttgaaaaccactgggttagtgggagaaacagataagacagaagttctccatacaccatgataatgccatgatgccatagggctggcaggagtgaagggaagagcatctcacaaagactcggggggatgcagggaggaggaaaaattaggaaatgaagtgggctgagttgcagttagcctgtggggaaaatgaaggagaagggataaggaagaagaggaggaaggagggaggaagagtgaggagtaatagggaattatagttgaccttgaacaacttggggtttagggatgccgacccttgcgtagtcaaaaatctgagcttaacttttgactaccctcacactttcctaacagcctactgttgaccagatgctttaccaataacataaacagtttattaacacatattttgtatgttttatgtattatacactgtattcttacaataaggtaagctagagaaaagaaaatgctattaagaaaattgtaaggaagaaaaaatatatttactgttcattaaggggaagtagatcatcataaagctcttcatccttgtcatcttcaagttgaataggctgaaggaggagggggagagagaagagactggccttgctgtcttaggggtggcagggatggtagaggtgcaggaggtggaaggggaggcaggaaaggcaggcacactcggggtagctttcgttgaaagaaatcttcatatgagtggacccatgcagttcaaacctgacttgttcagagtcaactgtacttgttccaggctaagaacagagaataaaaaaaaaatgtatagaggcctgaaacagcatattatattaaaagaactcaaagccggtaaatgctttgctactgaagcataaagtgagaaaggggcatcatgggctctgaaattgcagccacaagtctacagaacacatttttcatagcccaaggtcagtcttctattaccctttgcagtgaggttatcatcatccattttcactcgtcagtgctggggagcccattaaatacttgccactatacttggtcccaacagttaatagactgtagcatcttttatttcttcacctagcctgaaatcagttgagcttttgcagaatcttagatatgtcgtttttttcttcaggtttagaatggggcacttaaaaagatgcatagtacttgaaaatagagaaagaaaatagcatgtagaaatttgtgcctttattctgcccaaacgtctcaaaaaggaaaaaaataattttaagggtaaatattgtcatcaatttatctgagctcttttgacttcctttgagcctgaaaaacaggatcagtgtctttttagtatttaccatagtgcctgatatgtagaaggtgtttgaccaatgtttattagataaatgttcacttttattactagtaatattaaccacattttaatagagactaataatacatgataaacttctcaaggatgcgatctcatttgatcactataacaacccaatgaggtaagcgaggaatagttgttaactctaatacatgttatatcttatccttgacccagtattaccccagtcatgccttcctttccctgcaatgaaagaaaaccgataaacacaaaatgttgtatcccatataagcattcattcttatggtagataagtaaatggaaaagataggtatgcattctcaatttttttaagtcctagaattataaaacagtaaagaagtgagaagagagagaaatcttaagggaccaacctcttgattttacaggtgagaaaactgaggccacatagccatttagtgcagagccaggattataaaccagatgtttggaatcctatgtggtggtggacacgaggatatactaattagcgtcgttaccggaaaattccacatatctctaaggagcagatcaccacacacctgcacagcccaagcctggattgtggaggtttttcttgtagagtttgtctttgatagaaagatacggtccagaaggccggcttcaaggacataagaaagggcatattcaaaacaaatacatgtatgcctattcttttaaaccggtacttaacaatagtatccaggtgtccaaatataatagcttatctgttttattttttccagaaaaggaaacaaggtcttagagaggttacattttgcataggattttgttagccaagtcagcatctgtttgcatcttaaaaatgagtcatacctattccttgtaagtaggacaggagggcagctggaatttcccagctcactccttgtcactgcttcctgcctctgctgctctttgtcctccacagcacgcttcattggctaaaaagtgaaccagatactacattacctcagggcagttgtaagtactgagtcagatgccttaggcttgtgtgatgggaagtttagggcgagaccaatgtcttgctttaacaacagtgtgaataagttaatttcttttgagattttattactcaatattccacccagaaagaaacacagatgacactcagccaatcaaaggccatctgggactgacaaacgcagagcttgttgtagatgacaaggctcagtggatggatcatcactgaaagaaagggaaacagtttgaactgttgtatctctctccttgctcacatgaaaaacaaaaaaatccttggccagttgcggtggctcacgcctgtaatcccagcactttgggaggcccaggcgggcagatcacttgaggtcagaagttctggaccagcctggccaacatggcaaaaccccgtctctactaaaaatacaaaaattagccgggcgtggtggcacacacctgtattcccagctacttgggaggctgaggcatgagaattgcttgaacctgggaggtggaggttgcagtgagccaaggtcgtgccactgcactccagcctggatgacagagtgagactccgtctcaaaaaaaaaaaaaaattccttaaccacagactaagtaagcattattgcacagagtgtcattcgctaatcttgcttgtgcctgaactttgaaagcaccagccccttgctttgggggctgggggcgtggggtgtaagtgtgtgtgtcctctagaagaagacaacactgagaacagaaggagaggatcttggagatttgttaatttcctattgcagttagccttgtctggggctctcactttagcacttaaaataacatactcctttgcacagatgttatttttttctcttcatgtgtacaacttgaattatccaatggccttgctttgaggatattcatcctatcttattgatcctgtcactgtgtaggacaatggagaacacagtaaaaaaccctcaatggatactacttacactaaattaactctatgaattcaaaatttgaagatgctacttaatcatgtaagcctggttctccaaaacttcatctgccatgggaaaaatcaaagcttgtaaaatgattaaacttgtaaaggaattaaactctaggattcactcattttataattggtattttcaccctaagagctttctttttcctctctggtgtttaaaaacaaagtaaaaccagacaaaacaagattaactaaattaaaacccctgtgactttaaaaaatgtagccaagaataatgtgcaagtgtctagttaggccaatagatatccttaacatacgtgagctgggaacacaaatgagcatgaagggcaaggaagagcaccaccccctgcttcttttcctgctcctgttcttgcagagggtcaggcttggagaccacatatggtcagctcaacactcaagtccaccaagcagcccatgaggaactcttccttccagagttgtgcacaccatgcagtgtggtccacctgcagaagcacacaacaggcgctgcctgggccagaggtccattcaggccatggaattggtctcaatgccatttaggcatgaatccagggtcctgggtaccagacgcatggtctaggtagggggtgtcatgtactaggtgagcatggggttccgctgggcatgttcccttgtcttgtaggatgttagctctgaggggcgtggctggaagaaggctagccttgagccctctaaaaggcagggctcagggcaaagctcccagttgctcaggcctgtgggtaatactgcttaaaaatccccttgagaacttctttaaaatgcaaatatctcgattcttttgtagttcaaaagcatgatgattgggtgttcacaggcatgtgtaagacgtgacaccctctgaacctccttatgacccggtacattacctgtctgacctgaaaaaaaaatgcaaatttctggattctacccgcctccccgcactccgacattacgatgtagcagctctgtggtaggatccaggaatctgcctgtgtaatcacaggttgatattctggtgtttcctggttttgctctgctgatttgggggatgtttaccagcaggagagcagcctctttcctctgccctcctcccttgctgccctccccagaccccagtgactcacgctcctcctgctcctcctgttgctggcctctctgttgtggttgccagcgctactttgcagacgctgcctgctccctgcacgccaacacagattctgtttccctgcgaccgctgctgctgttgtttgttccgtccctggtttattgtaggagagctgattgttctgttgccactgctaccaagctgcaaacaccaggctcacggtgcaaggggaaggggcttctcctctgggtgttctgcctctatcgcctaggctctcaggctttgttgccaatggcactgcgagaccctaaactatggccttgtgattcccacatctccatttagttctttcttttgttctctaagatctgagaaggagcccatgtctttcagtgttcctgttttcttgcgatacttcccccctccccgactccagaatttagggcaaccttctgctgtggtctgaatgtttatttctctccaccccgccaaacttatatgttgaaatcttaacccctaaggtggtggtattagaaactgaagcctctgggaggtaattaagttataaggacaaagccctcatgaatgggattactgttcttataaaaaaaaggccccagagagctagctagctccttccaccatgtgaggacacaacgtgaaggtgctgtctatgaggaagggtccctcaccagacaccaatcatctggcacattgatcttgaacttcctatcctccagaactgtaaacaaataaatttctcttgcttataaaccataagttcatgattttttttttttttttgagacggagtttcgctcttgttgcccaggctggagtgcaatggtgtgatctcggctcacaacaaactccgcctcccgggttcaagcgattctcctgcctcagcttcccaagtagctgggattataggcatgcgccaccatgcctggcgaattttgtatttttggtagagacagggtttctccatgttggtcaggctggtctcgaactcctgacctcaggtgatccacccgcctcggcctcccaaagtgctagggttacagatgtgagccactgcacctggccaagttcatgatttttgtaattagcatccaaaatggactaaaacccccatcctcctgaaggttctgaatctgaggacccaagacttggctctcagccttaatgtcctgctcccactattttcagggggcccaatataaatttcctgagtttttgaggtggttgggcttgcagactgacctttagtatgccctttgttacatttacaaaatagattgcttacagggttagacaaatacagttgaccctctgtatccctgccttccatatccatgggtcaaaattatttggaaaaaaaaatgtgtctgtattgaacatgtatagattttttttttgtatatttcctaaactatatcgtataataactacttacagagcattcatattgtattaggcattataagtagtgtagttatgatttaaagtatgtgagagaatgtgcacaggttatacagaaatactacaccatttttttttttttaatcagggactgaagcatcttttcagctatgactttggtatccggtggcgggtggggcggtgggtgggtcctggaaccattcctccatgaataccaagggataactctaattgctaaatcgtttcctatttttgtgaactggtaaaggactgcatgagaaaggccaaaaattaaagaataatatgcttattcaagcccggtgtggtggcgggcacttgtagtcctagctacttggaaggccgagatgggcccaggagtttgaggctatagagggctatggttgcacctgtgaatagtcactgcacactagctcgggcaacatagctagaccctgtctctaaaaaagaaaaattctgctgtaataaacctgcacgcataaaatgatgtctatgtgtctatatagtgtgtatatacatatgtgtttaggaaatgtgtatatatgtgtgtgtgtttgtgtgtgtggatactgtattagttaagacaaaaaaatctggcttcatatgttataaaataatgtctggagctatccactcaagtgtgctttcttgtttctctgtttttttttttttcctatttcattcagtggttttcactgcctttgggaaaaagtgacacagcaaaacacttagaagaatcaaatgtttatcctttgagaatgtggtctgtacataagagaaaacatttagaatcaaattatgagactaaaccagtttccctcacctgcagctagataaaaatttctaagaggaaggagagaatcaggaaagattgaagacttgactccctgataagggttctgcccgagttctgagaatggagaataaaagacaccctccccctctctaatagattttgtcagtgaaggtcagagaggcccacgaaatcaggtctggggagcaaggtaaaacccagaatttctacatgatcatgttaaagagggaataaaggaatatcattatagtgtatctgggcaggtgggcatgagacagcctgattgagttcctgaaatcccaggtcggtgtgggagcagcagaatattttaggtggctgagagctccatagtttctttctttctttctttctttgagatggagtctcactctgttgcccaggctggagtgtagtgacgcgatctctactcactgcaacctgtctccctggttcaagtaattatgtctcagcttcctgagtagctgggattacagatgtgtgccaccacacctggctaatttttttttatttttagtagagatgggattttatcatgttgcccaggctggtctcaaactcctgacctcaagtgatccacctgcctcagcctcacaaagtgctgggattacaggtgtgagccaccagcagtcccagctactcaggaggctgaggcagaagaatcgcttgaacccgggaggtggaggttgcagtggaccgagattgtgccactgcactccagcctggtgacagagcaagactccatcttaaaaaaaaaaaaaccttctcaaggtattttctgtgcttcttgttttctcttttgtatttttcatctttatatctttgtgtttcattctggataacttttagtgacctgtctcctagttcactaattctctttttagctatgtctagtattataatttgtttattgaattattaagtttaggtatcaaattttcagctttaggatatctaatttgccacttgttttctgccatgattttttttttttttttgaggtggagtcttactctgtcacccaggctggagtgcactggtgtgatcttgactcactgcaagatctgcatcccgagttcacatcattctcctgcctcagcctctcaagtagctgggactacaggcgcctgccaccacgcccagctaattattattattattattattatttgtatttttagtagagacagggtttcaccatgttagccaggatggtctccatctcctgaccccatgatccacccaccttggccttccaaagtgctgggattactggcatgagccactgcacctggcttctgccataatttttaaccttgagttttacctacttaaacatagcaaacacagttgtttatatatttatctaataattccagtatcaggagcctctggagtctacttttgtctactttcattgttttttgttttttaaatttacattaacagtgtctagtctgtatttatgcctggttacttttgattgtgtgctagacattgtttttggcaaataattttttaaacacaatatgtacaaatcatatgaagcctagactggtgttttgttcaccaaaaaagattttaaattacttcagttacgttcctagggacactattaactcaggatgatgttaattgaagtttcagatttgatattttccaggtcaactggaccaactgtccctgctatatgatttatttcctaaagcaatatcaagttcagctctgcacctctcttatatactatggagctctcagtcacataaaatattctgctgctctcacactgccctgtagttcataagaggaacagtttactgttaatccgtattactcttacatctagggtgtagctctttgagctaccagtccaaagtgaagaataatttactgaattcctactttgtctggctctaggcactgattttttttaccctcttggccacctatcttcaattggaaaatgccctcaattcaaaaatgctccaagtgccaagctttcctatctgaattcccattttttcctgtatctggctggcaattcattagaatcctgctagccctctgatgcttctaagattttcatcttttatttttatttatttattcgagatggagtcttgctctgctgcccaggctggagtgcagtggtgtgatcttggctcactgcaacctccatctcctagggttaagtgattctcctgcctcagcctcccaagcagctgggactacaggcatccaccagcatgcccggctaattttgtatttttagtagagatggagtttcaccatgttggccaggctgatcttgaactcctaacctcaggttatctgcctgccttggccttccaaagtgttgggtttataggcattagccaccatacccagcctgaagttttgattaaaaatgctttactgggctgggcatggcagctcacgcctgtaatcccagcactttgggaggttgaggcgggcagatcacttgaggtcaggagttcgagaccagcctgaccaacatggtgaaaccccatctctactaaaaatacaaaaattagccaggtatggtggtgcatgcctgcaatcccagctactcaggaggctgaggcaggagaatcgcttgaatctgggaggcagaggttgcagtgagccgagatcgtgccactgtactccagcctggacaacaagagcgagactccgtctcaaaaaaaaaaaaaaaaaaaaaaaaaaaaaaaaaaaaaaaaaaaaaactttaccggaattaaagcccagtcatcttgaagccatgatcatgacgctgtggaagaaccggtgaggtaggatgagacatattctcagatgctatgctgatttggggctgtgatgattttggaccatagactatgatgaggcttcaaaaagagtgcaatagtgtattttaatttctttggttagattcaaattaatcttcagaaagacaaaatgcagatgtagtcttgttagagcttgctgatgagactaaattttccaagtgtttgaggaatgcctaacaggggaaaggcaaagcaaactatttttaatgaccttatggctctgaattgctaaaagggagtcagtccaccaggctcaggctacttggagtagaggatcctgtttcagtgacaaactggctcatcccttaatctgccataaaatgatggcttagcatacatgtaggagctggggctaagggagaaggaggtgctgtgttttgcagaagaagctacattctgtagtaaggcctgactcttccctggccttggaggggaaatacttgtgagacagtggccaggatcagctgaagtgccctctcttcttgctttgcctatgggacactgagcccctttttgtggaatatattcatccagagaaccctcacaccttataatgcataaagtgataaaggcttggagatctggagaaacccaaggtgcgatccctggctctagaagaaactctgggcagccagcatgatttacttttctctgctccaaagactggaggataaattaaaggaaaagagggtatgacccagcaatccactggtgcgagttgttgctttaagcaaagactactgcttctcttcctgattttcccctgaccatactctcccagaggtgtctcccagcaaccaccagagttgtggttaagtacacctagccaatccaataaatctaaaggagatgcagtccacacaaccttgcatgacttgtcatgtgagttactgttctggagagacaaactcaggctggaaacttatttgagatagcttatgaaaacaaagataatttatgataaggatacaggcactctcatacaatctaaggtagaaaaacagctaagcatcagaacaaactggaccaaagacttaaacacttctgctcctttgtgtaattggtttcatgcgtttctctctctcccttcctctctctcttttctctctgtggactaggtttttctacttttcatatacaaattttaaaaatacaatttctggccaggtgcagtgactcacgcttgtaatcccagcactttgggaggccgagggaggtggatcacttgaggccaggactttaagaccagcctggccatcatggtgaaactccatctctattgcaaatacaaaaattagccgggtgtgatggtgcacgcctgtaatctcagctacttgggaggctgaggcaggagaatcgcttaaacctgggaggcagaggttgcagtgagctgagattgtgtcactgcactccagcctgggtaacagagtgagaatctgtctcgaaataaatgaataaataagtaaaataaacaataaaaataaataaagacaattttaaaaatttcccaacattaagtgtcagcaatttggagagggacagctgtctcttgttctctctcttctccaattctcaattcctaggtctgatgctttccctggctcaactgactatggttgtggggtagggccatgaaacagaaatatcacattaggatccaacctttaattatgtagatggacagcagtttacagaaaaagtggtggggaggtggagggaggtgctgaacagacattctaaaagggctccaccaaagaaagctatttgttatatttatgaacattctggaaaattctttcaattgtgttcatgaataaattatgattggttaaaagctaacacacatgtagattatataacttctaaaatttgtatttggtatctgaatctatatattattttggcatgtatagaaaaatcccagatatttcaaaggctatcattagaaaaacgttaatgaaaaggttaatggaattctatatatttagttcctgtgagaatgtccagtttaactttcttaatcaactgatgaagaaacagaactgaaatcacaagattataaagatattttaacgatgcatttaggttttcattctaaatgctgaaaaaaggtatccctgcaaatactggttaagaaattaagaagtccaaaacccaataatgtagttggcagcctgttataaagatttagagtattcaaagataaaggcaaataaaaagactactttttataccagagtagaaacagtttattttcatgatcactactcttacttcaaatatatctattatctaagttgatgcttgcaaaaagtcctgattcttacacaaaggcagtcgattcatggatctcttagagagagagaaaaaaaaaaagctagttgggtgtgttacagttatatgaatcatgtaggatgctgcttaacgctatatttatcatggatgaaggcatgttttcaggggaaactatgagtctacctaaagttacccagttcacctctgttccaagggactcatcttttcagcattttgtttagcatgttacaaagtaccccgatgtcttctaaactattaggattgcaggaggaaactctcccagagctgctagaagtcatccttgaaagtttggatttctcccgaaaacttgtatttctatcattgttttaactatcttcttgaatcctcttgatcctgacctacatgtcctcttcccttgattgcatttaaatttagctgcatataaccttgctcttttccttctaatccaacctataaaccatatcaggggaggatatgtgatttgtcaattttgttgcctcacttcctcctcaagaactttcagtggctccattttacctctgagattaaattgcagccactcatcctgagttttggtgttccacaatctgacatatctagtcagctttgtgttctagtgtgtttgtgttgctataaaggaagactgagactagatagtttaataagaaaagaggttgatttggctcacaattctgcttgctggaagattgggcatttggtaaaagccttaggctgcttctattcatggcagaagagtaagcggagccttcatgtgtggaaatcatagggcaagggaggcagcaagggaggtgtggagaggtgccaggctctttttaacaaccacttctcatgggaactaatacagtgagaactcactgactctttctacagggagggcattaatttattcgtgaatgattctcccccatgaccaaaatacctctcattaggccccacctccaacattgggataaaatttcaacatgaggtttgaaggggggacaaacatccaaactatagcattctgctttggccccctaaaacttatgtccttctcacattcaaatacaatcatttcttcctaatagtccctaaaagtcttaacttgttccagcataaactcaaaagtccaaagtccaaagtatcacctgcgactcaaggcaacttctttacagctgtgagcttgcaaaaataaaaaatgaattatattcttccatgatacaatggttgtacaggcattgagtaaacattcccatttccctaagggagaaactggccaaaagaaagtggtaacaggtcccatccaagtctgaaacccagtgcggcagacattcttttttttgaggcagagtctcgctccgtcacccaggctggagtgcagtggtgcgatctcggctcactgcaagctctgcctcctgggatcacgccattctcctgcctcagcctcctgagtagctgggactacaggcagctgccaccatgcctggctaattttttgtatttttagtagagacggggtttcactgtgttagccaggatggtcttgatctcctgacctcgtgatccgcctgcctcagcctcccaaagtgctgggattacagacgtgagccaccgcgcctggccagacattaattcttaaaactccaaaataatttcctttgattccatataccacatcctgggcatagtagtgtgaggggtgggtcctaaggccttaggcagccccactctttggctttgctgggtgcagcccacgtgactgctctcacagattgaagcccaatgcctgtgcctttttcaggctgcagttgtatgttgctggtggctctataattctggggtctggagggtggtagccctgctcccacacctccaatagataatgcccaagtagaggctgtgtgtggttgatctgaccctatggcagacttctgcctgccttcccaggtgttccaataaatcctctgaaatctaggtggaagctgccaagcctccaacattcttgcattatgggcacctgcagatttcacaccatgaagccaccaaggcttaccacttacacccacctaagcagtggctcaaacagtacctggggccattggagccatggatggagccagagtggccaggatgcagacagcagcatcctgaggcagcacagggcagtggtaccccaggcttgtcctgcaaaattattttgtcctcctaggcctctaggcttgtgatgggaggagcagcctcaaaggtttctgaaatgcctttggggccttttttttccaaagtcttggctattagaacctagctcccacttagtcatgctaatatctctctagcaagtgtttggctgcatccttgaattcctctcctgaaaacactctttcttcatctaccacagggccaggctgtaaatcttccaaatttttatgctttacttggtttttagttacaatttacaactttaggtcactcatttgctgccatatctagtttacaatcatatttacaattaaaagcagtgtaaaccaaaaagtatctgagacaggtctcaatcaatgtaagggtttattttgcgatggttaaggaccatggcccatgacacagcctcaggaagtcctgagaacatgtgcccaaggtagttttgtgtagcttggttttatacattttagggagacagaagttacagacaaaaacataaatcaatacatgcaaggtatacattggtttggcccagaaaggcaagacatctacaagtgggggcttccaggtcataggtatattcaaaaatttcctgattggcaatggttgaatgagttaagctctgcctgaacagttgaagtcagcttgagttaagataaagaggttggctgggcactgtggctcatgcctgtaatcctagcacttttaggaggctgaggtggtcagattgccacctgggcaatctgtttgagatcagcctgggcaacatgatgagaccctgtctttccaaaaaataaaaaaattagatgggcatggtggagcacacctgtagtccttgctactcgagagactggggcaggaggattacttgagcccaggaggcagaggttgcagtgagctgagattgcaccattgcattccagcctgggtgacagagccagaccctgtctgaaaaaaaaaaaaaaaaaagtgaaagtcaaggttcttgtcatgtggatgaagcctccaggtagcaggcttcagagtgaatagatgatgaatgtctcttattagaacttaaaaggtgtcagactctctggaaaaaacttggtaagggagagattctctacagaacactaacttcctccacaagagacaacattgcagggccttttcaaaatgtcaaataaatatattttgggataaaatacttgtattgtattgtattgtattgtattgtattgtattgtattgtattgtatcgtatttttgagacagagccttgctctgtcatccaggctggagtgcagtggcacgatctcggctcactgtaacctccgtctccccagctcaagcgattctcctgcatcagcctcctatgtagctgggattacaggtgtccaccaccatgcctggctaatttttttgtatttttagtagagatggggtttcaccatgttggccaggctggtcttgaactcttgacctcaagtgatctgcctgccttggcctcccaaagtgctgggattactgggattacaggcatgagccaccacacctggacaataaaatacttttatttcctttaggtcttgctatgtcatgtgatgctatatcagagtcgggttcaaatttggtatcttattgctacaaagagtctgtcttgtcagtcatatgatctctgttttaatgttaatgctggtcatttgtgtctaaactccaaagggggagggtgtaataaggcatgttgggtaccctctcatcttgctatggcatgagctagtttttcaggtttctttgggatctccttgaccaaggggtccattcagttgattgggggagtttgaattttaattttgatttccagcagccacgccacttcttgaatgctgtgttgcttagaaatttcttctgctgctgggcatggtgactcatgcctgtgagaggcaggcactttggaaggctgaggtgggcagatcaattgggctcaggagtttgagaccagcctgggcaacatggcaaaaccccatctctacaaaaaatacaaaaaaaaaacaacaacaaaaaaacaaatcagccaggtgtggtggcatgtgcttgtagtcccagttactcgggaggctgaggtgggagaatgacctcagcctaggagatggaggtttcaatgatcctagatcgtgccactgcattccagcctgagtgacagagcaagatcctgtctcaaaaacaaaacaaaacaaaacaaaatttccgccagatatcctaggtcatcactcttaactgcagccttccacaaatccatagggcatggacacaacacagccaagtttttttttctaaagcataacatggaaccctttgctctagttcccagtaagtttctcatttccttctgagacctgctcagccttgcctttactatctatatttctatcagcattttggtcaaaaccacttaactaatctctaagaagttccaaactttccctcatctgcctgtcttcttctgagccctccaggttcttccaacctctgtccaatgccctgttccaaagttgcttccacattttcagttgtctttacagcaacatttcactacttggtaccagtattctgactttgtccattttgcattgctttaaacgaataccggaggatgggtcatttacaaagaaaggggtttatttggctcacagttctgcaagcctgtacaagaagcatggtgccaggatttgcttttggtgaaggcaaggaagcttccattcatggcagaaagtgaaggggagcctccatgtgcagagatcacatggcgagagaggaagagcgtgagaggaggggaaggtaccatggtctttttaacagaggtacaggcttttgagggaactaacagattgagaactcgctcactcccacccctgccagggaggtcattaatctattcatgagggatccacccacataacacacacatctcactaggccccacctccaacattgggatcaaatttcaacatgaagtttgggagggcgaacatccaaagtacagcaccttgtttcttgttgttttctaatatttgttctttatcccaggaaatggggggtaggaaggtgagttcttggtgtactctaagcagtcatgctcagcctgtactatcaaattttattccatttattcttctgttgaggcttgcatgacttccctaaggtacaatggcagagatagccacatgggtagtaaaatcaggggcagacagaccagctttctgccaggaatttacctcagggaaattcctcatctttgactttcctcgttctgacttttttttcttttaattccacctcctctccaaacctggcactattcctttccgatctttatccttgtccttactgttttgaagttggctcttatgcctgtttgtctttgcaatctgtctctgcgtcgcgtgttggtagtcatttatttttgtccctagtcatgattcccagaaccttgctgtggtcattttgatgccccaccctttgactattacaaaccaggagagctcatgcaagtggccacatgctgtagtggttaagagcacaggccccgtagctgaacttgaaactcagcatgacaacatgctggctgtgtgactaaggcaaattaaatgaccactctgtgtccttattttcttatacataaaatggagctacaatagtacctcctcatagggatgttgtgaagcttcagtgagttaatacagatataatgattagttatctgcctccattaaatccaatcatcaatactacccagctttattaaaacttctgacttttgttttggatgtggccaggtcctgaactgaattgttttttccaggtcaaatttaaatctaccctcctttcctttttctcaatgccaaattgttcttcagtttccatctctagccccataatctttgatttctcttgcccacatggatggttaccttttctgaaatgtcatagctcttacagtgctagccacctattttgatgccaaatctttacaccaaccagtgttatcacttaatcaattcttacatctatgtcttaacttctccaaccaaacttaagacttgttggtgccaagaatcaaatctcatacttttgagttattcaaaccatacagaacagtagatactgaataagtatttgtctgaatgaattgtttgaataacttaaagagcctagaagcggctgggtgcgatggctcatgcctataatccgagcactttgggaggctgaggcgggccgatcacctgaggtcaggagttcgagaccagcctgacaaatatgatgaaaccccgtctgtactaaaaatacaaaaattagccgggcatggtggcatgcacctgtaatcccagctactcaggaggctgagacaggagaatctcttgaacccaggaggtggaggttgcagtgagccaagatcacaccattgcactccagcctgggcaataaaagcaaaactccatctcaaaaaaaaaaaaagagcctagaagctttccagggtggtcttgggggtattggctttagaagaggaagcttgatagatgaaaatttccagatcaacggcattttatgtacttctcagaaacaaggtatgactagactgaaagatctgaagtcaggaagaaacttcttggtatcagtctgtgcccttaggaagaagtgaggtcataagctctattagcacacatagctgaaaaactgaaagaggatgtaagagaaaggattgttaaaaaacaaaaacaaaaaaacacaaaaaaccaaaaataaaaaatctgggtgaggtatttgcaatactagagccaaagaatttgacctaagaggccgggcgtggtggttcacatctgtaatcccagtactttgggaggccgaggtgggtggatcacttgaggccagaagtttgaaactaacctggccaacttgttgaaaccccatgtctactaaatacacacaaaaaagggcccggcgcggtggctcgtgcctgtaattccagtactttgggaggctgaggtgggaggatcacctgaggtcaggagatggagaccatcctggctaacatggtgaaaccccgtctctgctaaaaatacacaaattagccgggtgtggtggcatgtgcctgaagtcccagctacttggagggtgaggcaggagaatcacttcaacctaggaggtggaggttgcagtgagctgaggtagcgccactgcactccagcctgggcgacagagcaagactctgtctcaaaataaacaattaactgggtgtggtggcacacacctgtaatctcagctgctcctgagcctgaggtgggagaatcacttgaacccgggaggcagaggttgcagtgagctgacattgtgccactgcgctccagcctaggggggagaaaaagaaaaaaaagaattctgatccaggcactgactcattgagcaagtcatctttactgttcaggcctcagctttcttcctttgtttttttttgagacagagtctcattctattgcccaggctggagtgcaatggcatgatttcagctcactgcaacctctgccgcccgggttcaagcaattcttctgcctcagcctcccgagtaggtgggattacaggtgcctgccaccgcgcccagctaatttttgtacttttagtagagatgggggtttcactatcttggccaggctggtctcgaactcctgacctcatgatccacccaccttggcctcccaaagtgctgggattacagatatgagccaccgcacccagctaggcctcagttttctaatgtgtaaaatgaaaatatgcactagaccttcacttgtttttttctatgtgataattttttttaaaaaaagaaggtgtcatgttacattttatctttatgtttacatttcatcttgtaaggttgcctttgagccttgacacagtgatttttctcattcaactagtttctctcccatctcaactagtgacctcaccatccactaattgtttaagccagaaattgggaacttttccttggttcctcttccttgtttacttcttccatctaccccatgagcaaatcctatctgttcttccttaaatttagttcccagatctatctcctgcatctcaggtctatgtacttcttcccatctcccctgctactagtctgtccagagctacaaccacttcccttatagattattggaataaccttcttattggtcttcatattttcactctgactcccctctgatcaattttctgcaatgcagccagaattatcttttaaaaatgtaagtttgagccaggcacagtggctcacgcctgtaatcccagcactttgggaggccaaggtgggaggatcacctgaggtcaggagtttgagatcagcctggccaacatggtgaaactctgtctctactaaaaatacaaaaattagctgggcatggtggtgggtgcctgtaatcccagctacttgggaggctgaggcagaactgcttgaacctgggaggccatatatatataaagtttgatcacaccactgtcctgcttaatctttttttattttttaacttttaaattttttaagagaagggtctctctgtgttgcccagactggtctctaattcgtgggctcaagagatcctctcatcttagcctcccaagtagctgggaatacaggcatgtgccaccacacccagtgactttccttcctaaaatgcttcaatagtttctttttctttttctttctttctttttttttttttttttgagatggagtctcgttctttcacccaggctggagtgcagtggcgtgatcttggctcactgcaacctctgcctcccgggttaaagtgattcttctgcctcagtcttccaagtagctgggactacagcatgtgccaccacacctcaataattttttgtatttttagtagaaatgggtttcaccatgttggtcaggctggtctcgaacagctgagcttgtgatccacccgcctcggcctcccaaagtgctgggattacaggtgtgagccactgcacccagccacttcaatagtttctttttgtgcttaacataaagtttaaattcatgtccagagcctataaggtgtcatatgaccaggcccctcaaggtatatccacttcactcaagccatgtttgtctcatcttaattcttcaaacaccccacattctttcctaactcaaggtctttgagcttgctgcttcttccaggtggactgatcttagcccttccctttgttgttgattttttaacttttttttttttttttttgtgagaaagtcttgctcttgttttccaggctggagtgcagtggtgcaatctcggctcactgcaacctccacctcctgggttcaagtgagtctcctgactcagcgtcctgagtaactgggattacaggcacctgccaccacacccggctaatttttgtatttttagtagaaatggggttttgccgtgttggccaggctgatcttgaactcctgacctcaggtgatcctcccacctcggcctcccaaagtgctgggattacaggcatgagccagcgctcccagcctttttaccttttttttttttaatttcaataggtttttggggaacaggtagtttttggttacgtgaaaagttctttagttgtgatttctgagattttagcacacccatcacctgagcagcgtacactctacccaatgtgtagctttttatccttcacccccccaagtctttccctgagttcccaaagttcattgtatcattcttatgcctttgcattctcgtagcttagctcccacttacgagtgagaacatacaatatttggttttccattcctgagtctccaattccacccaggttgctgtgaatgccattaatatgttcctttttatggctgagtagtatttcatgatatatatatacacacacacacacacacacacacatatatacacacacacatttatatgtgtatatatacacatatatatatatgtcacatttctttatccactcattgattgatgggcatttgtagccctgccctttgaatggctgacttcttcttatgcttcagaattaatactttgtaattacattaatatgttttttttaaaaaaaaaccttttacatatatattggtctgtcacaataatgtataacaatattatagtttctgttttaatgacttaactttggcaaactggtcaatgatttcattaaaactgatctttttaaaaataatcagcttcaatagacagtttaaccagatttgtcaactttttgtttttggcacagtctcactctgttgcccaggatggagtgcagtggtgccatcttggctcactgcaacctctgcctcctgggttcaagtgattctcatgcctcagcctcccgagtagctgggattagaggcacctgccaccatgcccagctaagttttgaatttttagtagagatagggtttcaccatgttcgccaggctggtctcgaatgcctgacctcaagtgatctggctccctcgaactcccagagtgctgggattacaggcgtgagccaccacacccggtctccataaaaaaatcttaaacaaaaggatatggttggtgaaatacaaatcctattgcgcagtaattttcacaaattttaaaattgacaataccttcgcttctttcagatcaattatagtggctttcaaatgtcatcgctcaaaaaagttcaaatgtcatcgctcaaaaaaaaaacaaaccttcactagaaaattaatcataaattgatggtacagactgggtgcagtggctcacaactgtaatcccaccactttgggaggccgaggtggatggatcacctgaggtcaggagttcaagaccagcatggccaacatggtgacaccccagctctactaaaaaaaaaaaaaaatgaaaaaattagcccggcgtggtggtgcatgtctgtaatcccagctacttgagaggctgagacaggagaatcgcttgaatgcagaaggcggaggttgcagtgagtcgagatcataacactgtaatccagcctgggcaacagagggagactcctcaaaaaatataaaaataaataaattgatgttacatttggaaaaactgctgaaattttcttcttctgcaaaaagttagaaaaaaccactgaatgattgaaaacattgacattatttaattctttgctttagagcaagtactcagttcttgattgaagtgattgagggattcaaacattgtccttttgttttcttccggtaacgtcagaccagcatattttgttattgctgctggctgttttcttcaaaatttgctttgaaaaagatgtaaatggccatttccttatacttgtgattaaatatttgttggcctttccaccagttctctgcactgatcttcaagaaaaaattttaaaacctgcacacaaaattttaaagactgaacacagaattttaaagcatgcacatttttcaaagctgtttctatctctttggaagtttgtgtctgattaagttcatctaagacttcactccaggaaaaaagttaacccagaaaagataaatagcctcagcagagagaaaaatctactgattttcttgtgtctacattttgttttagatagcataatacttcaaaagttggtactcatttcttaaactttactgtgtgcatagcttcaaaatgaatactttgttgtgtgtgggaaagccttttcattgttatacttacaatcttcagcatggtccatccgtgaatcttttttaaaattgataaaaaggccaggcgcgatggctcatgcccgtaatcccagcaccttgggaggccaaggcaagtggatcacctgaggtcaggagtttgagaccagcctggccaacatggtgaaacctcgtctctactgaaaatacaaaaatcagctgggtgcgttggcgtgcgcctgtaatcccagctactcaggaggatgaggcaggagagtggtttaaacctgggaggcggaggttgcagtgagccgagattgtgtcactgcactccagcctgggcaacagagcgagactccttctcaaaaaaaaaaaaaaaaatggttaaaaagatgaaataaaaattttccaagttcccctcaacccccctaaaaaaaaatcatacatgaagaaacatttccaaaacagtggagtttggagattgatttgcacaagcacaaatgaggatttaggataaatttctttgacttttacctgaacactacagtcagtcttggccatagtttcagcattgccatgtccttggtcatgatagaggttcatgtccagcatatcacaattcagtcatatggtgactattatgtgagttcaggagtgtttatcctagaaatagaaagacacccaggaatgactcctttctttcaaatttgctgttctcaaaatgaacatacttaaggactttacatttgatcagggtataaaccactgggaagactaagtgctcagaaaaagaaccaaagacttggagataggaacagagcctgaaatgaacagaaactattctataccccccatgaacctagaaacaaatgtgtatagctaagcgtattagtccactcgggatgctttaacagaatatcaataaactggaatgcttcacagtaaacatttatttctcacagttctggaggctgggaagtccaagatctggtatctgctgaggttcctcttactggtttgcagatggccgtcttcttgttctatcctcacatggcagagagcagagaacagaccatctcttgtgtctgttcttagaagaacattaatcctatttatgagcactctaccttcgcaaccaaaaggcttcatctccaaataccatcacttggagatttagccttcaacacaggaattttgggggtacacaaacattcaatccatagcactgagtctgtatgtgttgggaactgattgataaattggaattcttcaaattaacttacatgtagaatacagtatttattaaaggataagtaaaaagaaatgtgttaatttatagtgtatttattattattaaaagtctatagggctgggcacagtggctcatgcctgtaatcccagcactttgggaggccaaggtggggtggatcacgaggccaggagtttcaagatcagcctggccaagatggtaaaattccatctctactaaaaatacaaaaattaattgggcatggtcaggcgcacgcctgtaatcccagctacttgggaggctgaggcaggagaactgcttcaatgaacccgggaggttcattcaagatcacgccactgcacttcagcctgggtgacagagtgagactctgtcttaaaaaaaaaaaaaaaaaagtctacagtaactgcaattgtttagaatttaagccaacaagatatgttttcttttccgggagttgtattttttatcactgattgtctacaattgacagtgcatgtcaaaaagcagacttgtcgtgctgcagtggctcacgcctgtaatcccagaactttgagagggcgaggcaggaggattgcttgagcccaggagttggagaccaacctgggcaacatagtgagatcccatctctaaaaaaataaaaataaaaccactcatttttgtcaattttattactgcttttaatttttctaaagacgatgtgctgctccagctctgggtacacacatgcccacgagagcaagctcatgagagaagaaactacatcccctctatccacctatatttctaacgccttgcacagtagctggcacatagtggacatgaaataaatatttgtggaataaataagtgaagaagaattttagaatactttataagaaacaataaatcttcagagatcaacatttcaaattagtaactttatttacaaacctctcttctgggttttattatttactacaagtgcttgcaagacctgttattgtacactcatgtattcctatcaaaggtaatcatcagacattatatttcattaaataatttaatggtgctttctgttctttattcattaatttttttgtgtgtgtgtgagaatggagtttcactatgttgcccaggctggccttgaactccagggttcaagtggatcctcctgccttggcctcccaaagtgctgggattacaggcatgaaccaccatgtccaacaatgttttctgctctttagtaagtctagccatattaaattttatgtgttttttttttcttttttgagactgagtctcactctgtcacccaggctggagtgcattggcgcgatctccactcagtgcaacctccgcctcccagtttcaagcaattctcttacttcagcctcctgagtagctaggattacaggcacgtaccaccacatctggctattttttttttttttttttttgagacgaagtctcactctgttgcccgagctggattgcagtggcatgatcttggctcactgcaacctccacctcctgggttcaagtgattctcctgcctcagcctcctgagtagctgggactacaggcatgtgccaccatgcccggctgatttttgtatattttttaacagagatggggtttcattatgttggccaggttggtctcgaactcctgacctcgtgatccacccaccttggcctcccgaagtgctgggattacagatgtgagccaccgagcccggcctaatttttgtgtttttggtggagatggggttttaccatgttggccaggctggtctcgagctccggacctcaggccatccacctacctcggcttcccaaagtgctaggattacaggcgtgagccactgtgcccagctcatattacattttaaatggaggtagaatatcaacctgaattcactaagagaatgcaggacaaattgccctgatatcctgacacaaaggtgaagcaggacttttttgtaatttgaggatttaaaagcatggttgctccaggccaggcgtggtggctcctgcctgtaatcccagcactttgggaagccgaggcaggcggatcatttgaggtcaggagttggagaccagcctggccaaaatggtgaaaccctgtctctactaaaaatacaaaaattagctgggcgtggtcaggcgcctgtaatcccagctacttgggaggctgaggcaggagaattgcttcaaggaacccaggaagcagaggttgcagagcccatatcgtgccactgcactctagcctaggtgacagagcgagaccagcctggccaacatggtaaaaccccgtttctactaaaaatacaaaaaattagcagggcaagctggcgggcgcctgtaatcccagctacacgggaggctgaggcaggagaatggcgtgaacccaggaggcggagcttgcagtgagctgagatggcgccactgcactccagcctgggcgacagagggagactccatctcaaaaaaaaaaaaaaaaaaaaaagtatggttgttccagtcctgggaaattgaaatagggggtaaaaaggctggtgggtgtggtaggcagaataattacttcttccctctcccaagatgttcaggtcctattccccatcctattccctggaacctatagctagattgccttatggggcaaaaggaatttttcaagtgtgactaaatttagaatcatgagttagagagattatcctggattatctgtgtgggtttaatgtaatcacaggggtccctagaaagaaaagagggaagcagaaaagccaaaggagatggaatgatgggagttgagatcagtcagatttacagatgcaatattgtttcctataaattctgtggtgaaagaaatgctatattgttgctggctttgaagatggaggaaggggctgagagtgaaggaatgcaagtgaccttaaattggaaaagacaagaaaataattggccctgtagaggttataaaagaagggtggtccttctgacacactgattttagtccgatgagattgattttgaacttctgacttccaaaaactgtaagacaatacattagtgttattgtaaaccactacatttttggtaatttgttacagcaataggaaacttatatagtgggccctgggatccatctgccctagccgtttatctaaaacaaaagatcttatagggaaagcaaacaaacaaacaaaaaatacagaaacaaagcaaaacaaagcacccctatgctctgagcttgggcctggtaagggcactatgagcccatgatttagcatgttgctgggaaatctccttccccctgttgagttgccagaatcgtggaagcagatggtgtgggggattcaggctcctccactgcttttctcagccagacctttgaggagagcttggctgaagtcttccaagctttatccccttgtagccattgttttgagccatctcaaacattaagtagctcttgagggttgaattgagtccttcctaaagacagactaaagtcctagtctccaggacctgtaaatgttcccttatttgtaattaggatgtttacagatgtaatcaaattaaaatgaggtcataccggactagggtgggctctgatccaatatggccggcatcctcataagaagaggagaagagacatagacacatagggaaaagaccgtgtgatgatggcagagattagagtgatgtgtttacaagccaaggaatgtcaaatattgccggcaatatcagaaactaagaaaaaggcatggcacagattgtctctgagagcctctcagagagtatggccctgctgacaccttagtttcagaggtctagcatccagaactctgagagaacagatttgtgttgttttaagacacccaccatgtggtaatttattacagtagcccttaaactaacacagtgaccttgtgtcttctgccagagggatttgatcacactggtgaggaagggtcctggtccataataacccaaatttctgccagggaagaggagattgaaaggtcccagtgatcttggcctatttacttgggagctcttccacagaacaaatgaactcctgaagatgagctgctacaaggattctgtgctttggacagaattgcacttgtctcttccccctgctgtcactccctgactaggaaaggtccaagctgtgaaggaatcccccccagaagagacttgtaagcattaaagacctgtggaaaactaagagggagggtggatagaggagtctggagaccgactaaccttctgagctgcttattgcctgaagtgggggtggagtgggctgcaaacactgttgtatttgggggacacatcacagatgcttatttgcaccttggactttgtcaggacactctggttacagcacaactttgtgaacatggatcacaagatacttggaaaagcagtgtttgcattaatcagattaggattagctaaaattttaattaaagaaccagagagtacttcagaggcaaggagatgatagttacctgggattacttgctatttgtgaaaccaaccagctgaccacttgtgttgtttgtcccaaggtataataataactagatgtttgcatattgtgattgtttctgttcggatttaatggctgatctatttatcatattaaaagagggatcaagttcaaagatttcaatgctctttatcttctttctatatatgatatttatttttaaatgtccatattaaatatacatatatacacacgattctcagaattacgaagaatgtgctgtgtagcattcaattatatatataattttttttttgagatggagtttccctcttgttgcccaggctggagtgcaacggcatgatctcgggtcacagcaacctctgcctcccaggttcaagtgattctcctacctcagcctcctgagtagctgggattacaggcatgtgccaccatgctgggctaattttgtatttttagtagagacggggtttctccatgttggtcaggctggtctcgaactcccaacctcaggtgatccaccggcctctgcttcacaaagtgctgggattataggcgtgagtcaccaagcctggctccaattctgtatatttttaaatgtaagtataaagatcaaagatacaaagtatattcacatatcagtttccatgttgttattattattattatttgccattttaaccatctccagatgaagaaaactgaatgtaaagttaaatatctccttaacttttactctatttaaaaagagactgaattatttgtgaggtaacccagttgtagctgttctactcttctctactgctagattttggaagaaccaaaaaggaataaagcaaagcatgacacagaagagaaagcagaattatactgtagtagtatgctcatattttatcagagtttgcctgtacttttgctgatttttttttctcctagcttggacattttaaaggcttattttaaatttatctcttctgtattaacaggtgagaagtggacaaatcaatgtataaaaactactatggctatcatcatttagaattttgtcttaaaagtaattggatttctggggtcctagacacataatgattagagatcatgccaccagttctatatggagccatctcaattcatcctttctcaatttatcctttccaggcatttttcttgaaactgcctaagtactggcgtctccctacgactattatatctgaaaacacattcagttttcaaaccagctgaattttatgcctgactattccttttaacttataccaatgaaaatcctttaataaattcactcacaattgctccactttctcaaacagagcacaaagcatctaacaatatttcttcatgattgatagcatacacactcttgacttcatattcttcaaaatcttggtatttttataagcattagtgccttttttttccccagtcagaagcactgacggatttattctattgggtgttgtcttctgtttggtctttagcttttcttagctgtgatcgtttattgctgaataattaagggcaattctttcccactgaaatacttttcaagttaaacattttttccttaaatttttgccccaggctacttctagatccagcgttgttccagcttactgagcattccagagggctaaggtccaagttagccaaggttttaaaatgttgaccatgtggacctgaattctttccagttacatatttgcatacttttaacaggagtggttatttctcgtcaaaagacagaacgctggaaataccagggcaaaactatgtgtttttttcttggtgatatcttgatcttagcattttactctctcttcctggtttctagcttgacctttgtattttagaggagagtaatagagtaacagtgcactgagaagcaatgggacatgacagaatagtttcagcagtgaaagtcagggaagctggtttcaaccattcattcacaagcttaaaggactttggtatctgactttgtggatgccactttctcatctgtaaaataagggggttggatcgtgtgatttataaggggctttcttactttctaacattccatattctataaagacagttaaagtctccagagagtaaagaatgtagaaaattcctgaaatttactcagctcctttattcctaaatatttttgaattctgaaattattattattattattttttgagatggagtctcactctgctgcccaggccaaagtgcgatggcacaatctcagctcactgcaatctctgctgcccaggttcaagtgattctcctgcctcagtcttctgagtagctgggattacaggcatgtgccaccatgcctggctaacttttgtattttcagtagagaaggggtttcaccatgttggacagggtagtatcaaatttctgacctcaagtgatccacccgcctcggcctcccaaagtgctggagttacagccaaagcacctgacctgaattctgagttttgattctgtttttttttttttttttttgagacagagttttgctcttgtcacccaggctggagtgcaattgcacgttctccgctcacagcaacctccatctcccgggttcaagtgattctcctgcctcagcctcccaagtagatgggactaccaccgtgcctagctaataattttgtgtattttagtagagatgggatttcactgtgttagccaggatggtcttgatctcttgacctcgtgaccctccctccttggcctcccaaagtgctgggattacaggcgtgagatactgcgcccggcccatactcacagatttctttgtgatattatctcatttgttttcaccacacccagatgatgtggatggtaggagaaatcccatgcgaataagtggaatatgttagtaactgcttccttgggtccttttgcctctggacttaactctttttttttgagacggagtcttgctctgtcacccatgctggagtgcagtggcgcaatcttggctcactgcaacctctgcctcccagattcaagcaattctcctgcctcagcctcccgagtagctgggattacaggcatgtgctgccacgcctggctaatttttttgtatttttagtagagatggggtttcaccatattccccaggctggtctcaaactcctgaccttgtgatccacccaccttgaccacccaaagtgctgggattagaggcatgagccactgcacctggcctggacttaactcttaaatgatgttacccaggaaaaccaatctatgactaaggcaaaaaaaaaaaaaaaaaaaaaaaaaaaaaaagttgcacagagaagagtggaaatatcagtaaatcagaagctaggcaggcctaatccctaatccacttggtgaccttctgcaaaacacctttctgttagccttttcacccgtgaatttttttttttttttgagacggagtttcgctttggttagccagactggagtacaatggtgcgatctcagctcactgcaaccttcgccttctgggttcaagggattctcctgcctcagcctcctgagtagctgggattacaggaacctgccatcacacccagataatttttgtatttttagtagagatggggtttcaccgtgttggccaggctggtcttgaactcctgacctcaggtgatccaccttcctcggctgcccaaagtgctgggattacaggcgtgagtcactgtgcctggcttacttgtgaaattaaagcttcaacttttactccttaggaacgtctcacaaatttccacacataaatctaaagtagacactcctgcttgccaaaagcatactctctaaaacattggttctcagacggacatagtggctcatgcctgtaatcccagcactttgggaggccgagacgggtggatcacttgagatcaggagtttgaaaccagcatggccaacatcgtgaaaccccatttctactgaaaatacaaaaaaaattagccaggtatggtggtgcgtgcctgtaatcccagctactcgggaggccgaagcaggagaatcacttgaacctgggaggcggaggttgcagtgagccagatcccgccactgcactctagcctgggagatagagcgagactctgtcttggaaacaaacaaacaaacaaacaaacaaaaaaattggttcttgagcagggcaatttcacctccaaggggacatttgacaatggctggggacatttttggttgtcacatctggggttggggagtgaagtgctattggcatctaatacgtagaggccagggatgctgctgaacatcctgcagtgcacaggacagcccctgacagcattaaacagtccaaaatgtcaattgttttttgaggttgagaaacgctggtctaaaagaaatgacaggacaggtggcttggctcatgcctatcatcccagcactttgggaggctgaggcgagtggatcacctgaggccagtagcttgagaccagcctggccaacatggtgaaacctcttctctactaaaaatacaaacaatagccgggcgtggtggcccacacctgtaatcccagctattcagaaggccaaggcaggagaatcgcttgaacccggggggcaaagattgcagtgagctaagatcatgccactgcactccagcctgggtgacagagtgagactctcaaaaaaacaaacaaacaaaaaaacagaaatgactcaaatgtttacagtgattacttctggatgggattatgataattgtttctctactgttctaaaaaactttctgttctttccaaatgtttaatattgagcacttattttacaatcattaaacaaagaaatgacaacaactgttaaaaaaaaattcttaagaactgaaaggcaaacaccaccaccactaaagccatgtcccccagatctaggttgtgagtcacatgataccgacttcagaggcagcatgtctcaaggcctctccaatgtgtgtcagggacagcagtgggagtagggccctctgagtcagcctctttgacctgggatgctgcaggagatcttagcaaacattcaagattttcactgagtcatttgcctgtggcattgatctgctcactcaagtcttccggtgttttggtgtgagggaggctaaagaggaaaaacagctgtttagtttctcattgatttgtattgtcattgagcaatacctggagcccaagtggatgtcttttattctgtggcctccacagctgggtcagtgtggaaggcttcagaccatgagaaattgttcctgggagtcaattattttaataagtgagatatcagagtatattcacagaaagaggcttccctggcactgtaagggcagccaggaataaaataaaaatgcttcttcagtgaagataattgtccaaattgaagacataggaaatatttctaatttgcctgtgtatttggtgaacatttctctctctctctctctttctctctttctctctctctctctctttctgtctccataaatgaagacatgggaaaatctattaaaaattaaattaaaatgcaacacttttacataaacaaaattcccaatcactctccttactttacctcagcccaaccaaatgtgagttaaatctcttccctttcccatgggacactagcatcttggtggcccagctcagtagctaagcatagagtaatgagtttgttaaataatttcaattacattgtttttgagattccagggtcacagggaaattctgacctgaattatctggatgaactctcacaattgtgcactgccttgttcaaatttgggaagtgctgagaagcactcatccaaggggtagatctggacttcagctcatgcagcataatagaatttcaggctcagtgatttctaatctgttaccacttgccattttctacttgaagagggcagacaccttcactgatctctgtttctatttcatcttttgaaaaatcgggatgataatggttatctggtttacatgcttttacatgcttgtcaggagttattttaaagcactttacaaatataaaaatgtacaataaaattgcagagtcggatgcagcaacccctgtatcctttgaggaatctatcacaattcatacccctcccaagccaacttttctggtactactctggaaaattgtgcttatacagttaaaatttttattttcaaaaagttgtgtaattccctttttcaaccatttttttttgttataagaaatgcaattaaaaacatacttttctttccaaatagaagagcctattctgccttataagaattgtttgaaagattgaaggacaaatgaagtcatacaacttctctgataccatattgaactcaaatgaacacattttgaggtaagaaatgagcctggaagatttttcttttttttttttttgagatggagtcttgcttcgtcgcccaggctggagtgcaatggcgcaatcttggctcactgcaacctccgcctcctgggttcaagtgattctcctgcctcagcctcctgagtagctgggattacaggagtgctccaccaggcctcactaattttttgtatttttagtacagatgggttttcaccatgttggccaggttggtctcagactcctgacctcatgatccacccgccttggcttcccaaagtgctgggattacaggcgtgagccactgtgcctggcaagagatagaatttttcacaaaaataactcataccagaaactttgtaggcccccaccgatgcccataatctttaggaaacaaactctagtgtcacctatttcctgataccttctgtaacgaccaggtcatattctgagttcctacagcactcagtgtttctcatcggagctgtagcaatggagtaataaatggcactgctcaggaagagagaattcagaaagaaaagagcagggcctagaaaaggaacaaacttatcggatgtgtagagaaagaatctgcaaagcaagtaataaaatccagaaaaacgtggtatcatggtggtcacaaaaaaaagagtggttaaattttcgaaaatggagacaaaccactcaccatgatcgtgccatctgaatagaaacacagaaatgatgacaaaaaaatggctaaagaaagaaggtcaacaaccatgtccaatgctttggatattaagaagtgttcagatggatttagcaagtagaaagtcactgacacttggtgcacaaccagacctcaatgtatttaggaggaaactgttattttggaacaattgaaagctttcatttggctgagaaatatcaactcattcttaaataggtatgttagaaggagcctctgggcctgatatctccttgattacaaggaaaatgaataatagttgcgtctgataaccatgacatatcacccctatgtttgcttgtagctttcagcagctcagaacattgttgaaaacactcattatcccaatatccccaacagggaagtgttaaaacctgccttgtgcaactgtcaatctctgatgattagataaaaacaattatgtcatgagttgtagctattgttatttacttcccaagagccagattacacaggtatctgattgctgaagcaatgtctggatgtaccacgaaattccacatgcatgtacagtataaacacctctggctatcaccttatctaattttgatcagatacaggttaatcccctcctgtatctttatatgtcctgaatttgcctcatccacctgaactttgccataatttactctcaatttgtatgtgtctgtgatggagttgttgtcattttccttttctttttcttttttttgaggccaagtctctttctgtcacccagactggagtgcaatgacgcgatctcagctcactgcaacctctgcctcccgggttcaagtaattcccctgcctcagcctcctaaatagctgggactacaggtgcatgccaccatgcctggctaactttttgtatttttagtagagacggggttttaccgtgttagccaggatggtctcttgatccgcccgcctccgcctcccaaagtgctgggattacaggcatgagccaccgcgcccggcctcattttctctatctgtctgcttaatcaggttttgcaagtttcacatttcctcaactaaacttcattttaccacccaagcaaacttcattataattattttatttttctgatgacatcagatttctgtaggggtacctattagctagagatacttagattttattttcccagcatgtgactatttcccattctatacaacacaatggcaagagcaggagtatgtttttggacaattaaagagagaaaaggccgggcgcggtggcccatgcctgtaatcccagcactttgggaggctgaggtgggcagatcatgaggtcaggagatcaggagattgagaccatcctggctaacacggtgaaaccccatctctactaaaaatgcaaaaaattagccgggcgtggtggtgggcacctgtagtcccagctactctggagggtgaggcagaatggcgtgaacccgggaggcacagcttgcagtgagccgagatcgtgccactgcactccagcctgggcggcagagcgagactccgtctcaaaaaaaaaaaaaaaaaaaaaaagagagagagaaaataactcagcttcatttagatttctattattcttctctgatccatatagtggatgttcacagaagtgtaggaaccaaaactatgcaagttaaactgttaattttagaagtttatagcagtgatgtggaaggctgaccaaagttggcgctttggtctcactataagccatagtaataaatacattaacaatgtccacaaacaacagtagacaccatttagtaagggcttgctccaagccaggcactgttttcagcttaagtctcacagccttgtgaagtagattctgtcccatcttagagcaagttggtctgaggatcctcaagggtaaggtctcttgccaaaggtcagcagaggtagtgagttcagaactgggatttaaatccaggctgttctatttctattccacaattctgcctcaactgcttctctacattttaggcacacgtttgaatactgaaaatttgggtcacagagttggagatgtttcttcttctaggccccaaaccggagcggggtgcagtggctcaagcctgtaatccgcactacttgggaagctgaggcgggaggatcgcttgagctcaggagtttgaagatacagtcagctatgatcctgccactgcactctagcctgggcaacagaacaagatcctatctctaaaaaaaaaaaaaaattaaaattttaacacaagggcccaaacaagtcaacagtaattacaacatgatctttactactgtctaataacatctcacagtgctttaaacatacgtagttaccattctgtccacttggttgcctgtaatattaactcagtaagtaggaatacttcctgccctgactaatatactcataaatatatgctctaagtcaagggtcttgcaggttctgatttaaaaaacacaatttttttgagggtcactggctttacattatctcattcttttcaagttcctttgtacgtaaaacatcctatgctcagttatatgatctgttcaacctcctgcttgacagatatgaaaacagtgctctcatgtaatttatgtaatttacatttttacatatttagcagtacacctttgtgctatgttatattgtttgagaactaatctgtttttctgatggctggaagtctaagtgaaaagattatacatgaaaataattcatgtttattatcactaggagaaagtaagacaatttagtttgattcacaagcatttgaatccctattgtgtcagacattgtattggaaactggggatacaaggaagatataacctcatctctcagagttccctagttatcccatacatatatacaattattatttgtcaattaaattttttttaaaaatttagaaaggagtttccaagtaagaaaaatcatagcgaaatggtataattggtataataacagttaattagctatagtatgaaaatacagaggaagatctaactaagttggggattattaaagaaaatttaaattagctgggtgtggcggcagacgcctgtaaccccagctacttgggaggctgaggcaggagaattgcttgaactcaggtggtggaggttgcagtgagatgagatcactgggtaacagaacaagactccgtctcaaataaaataaaataaaaaataaagaaaattggacagagatgtggcatttgaactgtctttcagattaagaagaaagttactagttagccaattcaaatataagatttacaaacatagagtacagcatgagcaaaggtgtggaggtacaaaaagaataatgtttttgaggggagaatagcaagtactctgggggtggccaaagtttgagttgtgtggttttggtggtggatggagatgcaggaagattaggaagtagattgagatcagattgagaaaggtcttccagaccagatgaaaaattttgccatatttaggcaatagggagccccagaaattgttcaaccatcatcagctttacatttcactatggtaatttggcttcataagaagcatgggttggagattgataagagcagactccaaggggccaattcattaaactcaactgccaataatgcaagagacaatgaaagccagaatgaacacagtgaccatggatgccagaggcatttctaggatttttgtagaggacttaagagaccatttgggaggggaggaaggcagaagataaggggaaagaaggagttgatatctttgatgactgatggcacttttgctaagatgaagaataaatggtagcaagaataaattgactgggcgcagtggctcatgcctgtaatccaaccattttgggaggctgagatgggtggatcacctgaggccaggagctcgagaccagcctggccaacatggtgaaaccccatctctactaaaaataaaaaaaattagctgggcatggtggcgggtgcctgtaatcccagctattcgggaggctgaggcaggagaatcgcttgaacctcgaaggtggaggctgcagtgaacgagatcaagttattgcattccagcctggacaacaggagcaaaactctggctcaaaaaaaaaaaaaaaaaaaaaaaagtataaattgggggaggggaggagatataggattcctattggaatgtattgagtttgagattccagcctggacatatggcactcttgaattgtttcctaggcgatcatatcactgtcttgatgatatctttaatcacacatatcacttgtggggaaagaagaaacttcaagagttttacacaccaatcctttactttgccatctagacaaattatatttttaccaatgccattttttgttgttattttgtgggttctgcttaaaacttcccctatatttttctaattatggtaacctagggaaaacatcaaattatgttgataaaattggctacaatctggctctaatgataatagcttagaatcatgaagcagcaatattttatcctgagagcaaacaaactttatcctgaacacatgtgttcttttgccttattcatctaatattacttgaaacttttatttttccactttgaatagtagattctgccaagtgttttaaaagcttttctctttttaggggaggaggggaacagcttttctcccttttgtctgataactgaggagtgaagatttaattggtgagaaaaatatacacactataaacctcagaatgttcccactgcttttaatgtttgatgtgcctgacagattaccctttcaaaacagataataggataggtggtgctggaaaaaaacttttccatccaagacaaaaccacatggacattgaaaagaactggcatttgcctagacatttagtgggggacatgtccttagggcacagattccatagtgaaaggctcttctcccccttccacacactccagctctctctagaaggtataatggaaagaactctgagcaagaatcaggaagttggcctttgttcctgactgtgccactttgtggaactgggcagaacttacctcattctgtgctttagcagcttcatttgcaaaaattaatgattacctcaaatgatttctgattttagccaaaattaaatacagtagttttaaaacaactgctacatattaactacttacgtatgtaattttgcactcaaaataaattatattatggaaaagaaactcaacctatgttaaccatccctgtactgatgaggaaactaagacttaggaaaaagaagtgatttactcagtattgggcagttagtgagcatttttgagccaaggtcttactttaaccagagacctttgcataatattgtactgttactaaacactttctattatttgactagaggaacacaacatattgatgcatttgaaacaataaaataataaatatttttccttaccctcggcagaaacaggatgatgagaaacattgactaaaaatttaatcaagccttaaggacaaatagtatcacagttttgaataggagattgggtaccttggaagtaattatgaagaggtgttttaactcagcagtaggctctttcttattcctgctaggaatgaagaagcacaaattgaaagtgaagaaggaggaaataaaacactgactctatgtgtaagaaaggtgacttgcaaattatgaggcagttaggaaaatgtttattttttcttattttataggctgtatatatttgagaattaataattgtcctttggagggtgtgtgtgtatgtgtatgttggagctttgtgtgtgttttagtccattttcctactgctatgtgaagaaatgcccgagacggtaatttataaagaaaaagaggtttaacggactcaccgttccacatggctgtggaggcctcacaatcatggtggaaggtgaaggaggagcaaaggcacatcttacatggtggcaggcaagagcgtgtgtgcaggggaattgccctttataaaaccatcggatctcacgagacttattcactatcacaaggacagcatgggaaaaacttatccccatgattcaattacctcccaccagctcccctcaagacacatggggattatgggagctacaattcaagatgagatttgggtggggacacagccaaactgtatcagtatgcctgtgtgtatgcatgtgcacgtatataaattttttcactagtgactgatggaccatctataaaataaacaaaagagaagagacagggtctcactttgcctcctaggctggaatacaatggcatgaccatagctcattgcagcctctaattcctgggctcaagtgatcctcccttctgagtagctgggattacaggcacgtgccattatgcccaactaatgttttgtttgtttgttgtggagatgggagatgggagtactgctatgttactcaggctggtcttgaactcactcctggccttaagtgatcctctggctttagcatcctaaaccactacaatcttaaaaaggaccagtttcctggattacctctctccctccatcatccactatctgccgtcaactctatagagtcaagggctatccctgccttttcaatagaagccctcaagaagtcactccatagggactatcttgggctttgggaagtgtacagggttggggtgggtgggaaggtgaggaggaaaggccactgtttcaggtggggttggagggagatggaaaatggaccacagaggttcagagaacaggccctttgtggaaagggggagaccaaataatgctgcgttgtgaaaggtgaaacaggctgcaaacagaaggagcccacaggaagccctgctctgagcagctgaacattctggggtcctcagactccgataaaaaagcacatttagcctacagctttatgcccttcctcctacccttgtggactctgccacagacatgccctccagattgattctatccacttgtctctagtctactgctactattttagtctaaggccttctccccgctttcctgggttatggtcacagactcctatctgagttcccagcaccaggtgcccagttgttttcatctcttaacacattccacatattatagcaagagagatctttctcaaatgcaaatcagaccttgttgcatcccaatctcaacccctttagttgctcttctctttgccctcatggtcaagttcaagctctctagtgtgggggcagatgttcctttataatttttctgcttatgtctcctgcctcaggcctcacaattctccacctcacagatgatgtctcagccatgatgagttcctctcaaatcctttaggtttcagagatgtcatttcccctgggaacattttcctgactcctcgttccaagcatatgtctgtctttatgttcccatagcacctgatcattggatcatggtagggtttatcacggtctcgtatttgtctgcttacttgtctgtattcttcacttctcaaatatgtcttctttgttcatcactgtaactcctttccccagaatgttctcagatatttacacccatcttccccctctgtgaagggaataaatggatatataacactgtattagtccattctcatgccactatgaagaaatatccaagactgggtaatttataaagaaaagaggtttaaatgattacagttctgcatggttggggagaactcaggaaacttacaattatggcagaggcacctcttcacggggtggcgggagagagaataagtgcaagtaggagaaatgccagatgcttctaaaactatcagatctcatgagactcactcactatcacaagaacagcacgggggaaaccgccccccatgatccgattgcctctacctggttccaccctagacatggtgattatgggaattaaaatccaaggtgaaattttggtggggatacagagccaaaccatattaagcaccatcctcaaaatagccttccagctgaagacagctaaggcactcatgtagtcttattttgtctcagacaaataattttacctttgaatcattgttcattaatctagattttaacctgaggccctaaaaattgtttatcatcttctgggagatcttactcctagatggtgttttattccacaggttaaatttaaacttgggccaaatctccatccttgtggcctgtgagtactgaatttgggactgaaagcctgggactaactggaagtgtggaaaaggaggagggtgtggcgctgccctcaatgatttttttttttttttaggatttctggtggaaaaggagagacactcaggaatccccagataaacatggtttagcttttgtagtcagatcctttccccaaatttactgcttctttctccaccacttctcaaccccccaaactgaacttgcctcttcaacacactcccttgtgccctatagacagtcacaagcttgacctatagagagcatgtatttcttgaggcaacgaaggtaggaaaccctattctaaaatgtttcttacacttttggctctgtctaaattctccatttttcaattaaaatggaaacgagattagaattctattctagttatgaatataatcagaacacaataaagcagaaagattgcttcaggctcttctgttaacgttacatttattcaacaactctttatggggacttgctatgagtgaggcaccaggctaggcaccgcagctacaaaggtgaagagaacataggctcttcttcaaagaaacttacactgtaagctttatagttatgaaatcatgattgcttaccttaaatgttcttgacctacattcttagatattttgagtcttgagaaatttgtttatttttttcattattatacaatgtcaattagctcagtggaatccaagatgttcggctagccttctgatccaagatagtggaccaaacatttgtatttactcattgtgcccctccatacttctctgaaataaaagtgtagatcttcaaaattaaacatatctataaagcaaagggaacagaaggggacattatcagcagattagacattccaaaaattttttagaaaataaaagctaaattgaatagtaagacacggaattattagatgtgtttggaaaaccaacagcatgaacaagataatccaagaaaaacaagttgtcccttggtgaaaatggaaggaatttgagaaatatagaagtgaactaaacaataaatacagtcatcccttggtatctgttggggactgattccaggacctccctcagataccaaaatttggatgcccaagtctctgatataaaatggtacagtatttgcatacagcctatgcacatcctactgtatactttaaatcatctttagattacttataatacctaatacaatgtaaatgctttgtaaatacttgttatattgtattgtttagggaataatgagaggaaaaaaagtctgttcatgttcagtacagatgcaactttttttttttccagaatctttttaacctatggttggttggaatccacaaatgtagaacccggctacagagagctgactgtaattaaaaccaacagcttctatttggtatactgaaagagaattgggaaatcattaaatccataaaataagaacaggatggagtgaaaaaagctggactctgtgacgaaatggacatatgtatggataagaatcaggaaagttttcataaaggaagtgccaaactgagctagttggccaaatgaactattctccaggtggatggggcagggcatttaggcagaggaagcaacaaagcacagagtgaagcccaggaaactacaggtagctgcagggagatgacggggctacagtgtgcatggagagaggccaacatggtgaggtaggcaggaggagctcctgaagggctccaacctgggaagccaggctaaagagatggcattctatcttgtcagtaataagaagcattgacattttgtagagatgatgaattgaggaagggatttatgtggtcatttgtggttctggctgatccccctgagtgctgtctgctagaaggattccaagggttaagtcctgaggcgtgaagaagaaccgatctgtaagatagcttaactaaggtggtagcattgggataagggtgtggggtgtgtgtgtgagggggatacaaagttattaaggtggtagaattgatggcaacattcatcttgacagagaatacaggatgaggagcagatttcagaggaatataatgagcccttttttagatctttgtgaatgttcagaaatggcagctggtgttgcataattgcaaaattagggcttagttagttattggcttctgagaacgtaactgcagtttttttctttccctctgccccactctttgaaagggggtggggctcaaagagtagtgtgtgtgtgtgtgtgtgtgtgtgtgtgtgtgtggtaaatacttatatacaaatttctttagatttttctttatctccttcactccttttcaacattttggctggttgttctgatattaccaaggtaatccacaattatggcaaatattcaaacaaaacaaattatagaaagtccagaaaaaaaaactctgaaataccttttccagagaccaccatcatgaacagtttggtctacagaattacaaatcttttgaagtatatagtatattcttttatgtggccattcattatattttatgggatcttagtattattgcttttaaattcatttcttatattttaaatttgaaatacttcaaaatatgcagaaaagtagagaaaataacattaacaccatatacttaccatgtagatttaagagaaatctacactttgccaaatttccttttttttttttttttttttttttttttttgagacagagtcttgctctgtcacccaggctggagtgcagtggtgcgatctcggcttactgcaacctctgcctcttgggttcaagcaattctcctgcctcagcctcctgagtagctgggattacaggtactcaccaccatgcttggctaatttttgtatttttagtagagatggggttttgccatgttggccaggctggtctcgaactcctgacctcaaatgatccacctgcctcggcctcccaaagtgctgggattacaggcatgagccaccgcacccgaccaaatctccatttttgtaaataatttttcagatatagaaaactacccaattatggctgggcatggtggctcatggctataatcccagcacattgggaggccaaggcaggcggatcatttgaggtcaggagttcgagaccagcctggccaacatggtgaaatcccgcctctacaaaaaatataaaaattagccgggcatggtggcaggtgcctgtagtcccagctacttgggaggctgagggaggaaaatcacttgaacctgggaggcggaggttgcagtgagctgagatagcaccattgcactccagactgggtgacagaacaagactctgtctcaaaaaaaagaaaagaaaagtaagaaaactacctgattactattacttctctctttctctctctctctctgtgttctagaggtttgcagtatcctgaagctggtgtgaatcaacctcacgctttttttttttttctttttttttgaggtggagtctcgctctgtcgcccaggctggagtgcaatggtgcaatcttggctcactgcacctccacctcctgggttcaagtgattctcctgcctcagcctcccgagtggctgtgattacaggcatacaccgccatgcccagctaattttttgtatttttagtaaagatggggtttcaccatgttggccaggctggtctacaaatgtatctatccataagcaataccgtatatagtaatatttttattattctattatttctattgaatgtttatattcatagtatcacactgtacacatccttttgcaatttgctttctttagaagcaacaatatatttttgagatttatcatgttgctttgtgtagattgcttactttttttttttgatggagtttccctcttgttgcttaggctggagtgcaatggcgtaatctcggctcaccgcaacctctgcctcctggattcaagagatcctcctgcctcagcctcttgagtagctgggattacaggcatgtactaccacactcggctaattttgtatttttagtagagatgggctttctccatgttggtcaagctggtctcgaactcccaacctcaggtgatctgcccgcctgggcctcccaaagtgctgggattacaggtgtgagccactgtgcttggccaattatttactttttaatttattttatgatacacaatttgtctctttatctcactttattttttgatttttttttttttaaaccaggatctcacttggtcacccaggctggagtgcagtggcgtgatctcggctcactgcatcccctgcctcccaggtgcaagcaattctcctgccttggcctcctgagtagctaggactatagggtgtaccaccacatctggttaatttttgtattttagtagagatggtattttgtcatattggccaggctggtcttgaactgctggcttcgagcaatttgcccgccttggcctccaaactctctttattttttagatattgttaacggtactatgggcagtatccttgaacatctctctttgtataaatgtgaaagacattcatagacatgggactaaaggaggtgcccatagtcaaccatgctaggcattgacaaatggcttcctaaaggggtaatacctgtgtacattgccactagcaatttgtacactttcttgattcctttcactcttgtcaaaacttactcttttttaaatttaaaattattggccaggccatggtggttcatgactgtaatctcccagcactttgggaggctgaggcaggtggatcacctgaaatcaggagtttgagaccagcctggccaaacatggtgaaaccctgtctctactaaaagtagaaaaattaactgggcatggtggtgggtgcttgtaataccagatactcgggaggctgaggcaggagaatcgtttgaacctgggaggtggaggctgtggtaagccaagatcacaccattgcactccaacacaggggacagagtgagactctgtctcaaaaataaaataaaataaaataattgtcaatattgttggttatgaaatgctatctcattattgtttaaagaggcatttcccttgataactagtgaggttgaattttgttttccagatgtgcatgagccattggtttttttctgttatgcattttctattcatatactttgaccacatgatatgtgcctggtcataacccatcaaactcttctttctctcagatacttcactttatggaaatctttttcacgtttatccctcaaacccagaattttgagtgtcatacctgttctaacataaatttgaggaaaatgaaggctaattcagaataaagaactatataagcagatggacagtgtgttctcctctaaataggggtgctaggataagaggcggtaggataaatgcacagcctcaaaatccaccacccactaaagacctcacagtacatgatgacattagcatgctgtgccagcatttctacctaccacgatgacctggaatgaaggacaaaaggggcaattgttaagtcctgtgcgtaaactttggaagagaacataccttgctttaaaccattaagggggcaggcaatagattcctgtacagggtggcttagccaaaagtggctggtcttgttctcatttatatggtttataatgattctaaatcattctcggagaaaaacagactcatttcatctccctttaattaggatttctgttactgcaatattttagtggcatttatgtcaaatgttttcttttgagaacttctcccttttactgtcttttttcttttattttaaacttttattttaggttagggggtacatgtgaaaattggttacataggtaaactcatgtcaagagggtttgttgtacggatgattcatcacccagggattaagctcagtactcaatagttatcttttctgctcctctccctcctcctactttccaccctcaagtagaccccagagtctgttgttttcttctttgtgttcataagttctcataatttagctcccacttatatgtgagaacacgcagtatatgattttctgttcctgcgttagtttgctgatgataatagcctccagctccatccatgttcctgcaaaagccatgatcttgttccttttaatttactttttgctattctgattagagagtggccatgctccatgctccatatggatattctttggaaacaaagcatttttgaaatggtaggattggggctagtaaaagagaacagaaagaattgtgaacagggtctcctccagtacagatggttaaagaacacaaatagggaagtgtgatgagtgacctccatttaattgggcgcccaagctcttggctgctccagcatgggttgccatcctgactgatcccttggctcagaaacagatatggtgctatcaggaaagcaaggccaatatctgaatattgcagcagagactgctcccatttcagaaagcaacccagattaaagttgatgattcagtttcaataaatgcttccttttttataaaaggcatttaacatcactctttcccctggtaatatggaattagcttttgggatcaactggaaaatgtcagagggcgattgtaaaaggccacctgctaaccacaggaagctgggctgatacagaatgccaggttaacttaaggtcgataatggttacttccttgtcactttttacatgcatccttgctctgcagtgggggtcataagaagtaagatgcatgcaaggtgaatttctagaagtcagcttctctgagaagtattctctgaccatacattcctactagtccccacatacgctgctgatctccccatcttcacccccattgttgaaattgctccctcattgtaactgttcactcatctgtctccaccataaagcttaggctcctagaaagtcaggaccagagctagtacagtgccccatgttcttatggaatgattttagtgccttgagtttggtgtggtgaccagagctggtggccaactgtcgtgaggccccagtccttctttttgtcatgctttccctcccagcccctccttgaccactctttcacctccatctttctacttatatagagacaaataataagatgcttgtacaaagggtgtacttgtattatcccatttgtgttgatattccacaacagcaaattaggtttttttgtttgtttgttttttgatggagtcttgctctgttgcccaggctggagtgcaatgcgtgatctcggctcactgcaacctctgcctcccgggttcaagtgattctcctgcctcagcctcccgagtagctaggactacaggcacccaccaccaagcccggctaatttttgtatttttagtactgacggggtttcaccatattggccaggctggtcttgaactcctgacctcaggtgatctgcccgcctcggcctcccaaagtgctgggattacacgtgtgagccactgtgcctggcctgataaggtttaaagattaaataccatgtcgttaaatttgcaaatctctcgaataggaaaatcaggaacaatgacaacattcggagcttcccagaaggtaacaactatggggagttttgtgggcatctgagagaagcacacacacagatggtttgcctttcattggtccattcttgcccagaaggcgacactaactgaaacaaagaagcctcatatgagaaggacatggggtcacagcagcttttggggtggccctgggtccttgatctggtctttctctggctcattttgtattgctcactttgttacttcacaatccagggcttgtgacatttttcttctctggagtggaaatgacagagctgcagaacacaagtttctgattggttcctatgagtcaggaaagagggccagttgaaactgggctcacacacacacacacacacaaactaggctcacatgtgttttcccatcagctaaacaagttttcagaagtacagaaataactcgttggggaaggggacccaggacaatgacaatgtttttgatggtaatgtctgcagaagtaaggcaggtttcctctgtgcctgaaaagatggcaccatttgaggagatggcatactcgtggtggaatcttcattaagatgtcaaactaagctgtaggaaatcaactctagaaaacagctctaatgtgagaaaacatatatccagttttatagagcaagagctgtgatcatggtgacatttaacaactgtattagttggccaagagggtaaaaatatacttgacctcttagagcaccataaatactctcagcttgtgggccaactgtgtcatggtcttttttctagcccctcctctttctcccttccttcttgtctctctcctcctctctcttccctcccctttctcctttctgaccctcttttctcttctctatcttctcgaaccttcccttcctcctctcctttaggtgctcagcacctctttgattcaataaacatttacggagctccttcttgtgccaacgactgtacacagagctgggatgtcaagatgaatcagttacatttcctgcccaatgccaagggatggcttgatgggttttgaccagcccctccctggactcccaatttcttttttttttttttcttttttttttttagacggagtcttgctctgttgccaggctggagtgcagtggcacgatctcggctcactgcagtctctgtctccctcccaacttcaagcgattctcctgctcagcctctcgagtatctgggattgcaggcatgcgccaccacacccagctaatttttttgtatttttagtagagacagggtttcaccatgttggccagggtggtctggatctcctgacctcgtgatccacccgccttggcttcccaaagtgctgggaatacagtcatgagccaccgcgcccggtgccctggactcccaatttctacctcctggaacgtgctttactcaccagccttggtgttattctgcaatatggccaactgggatttttttcaatcttacagaaattattctcggaaatgtttgctatttttttttaatgaagctacagcatacaatttaaggataaataatgtacttactctgcagctattgtttcaagtcaaatccgctgattactcctccaaaattcttttcttaataaaatctctgaccctttcctcttcctgttagaacttctggagctaccattgttcctcctcttgggctgctcataacctaggggagtcacagtgaaattacttgctttaaaattctttaatcactctgcgagttgttaggaaaagctgacacatctgatttggaaactcccactccagtggactgttgtgcctcagcacacagggacgggtggagcaaaggaacaagaagccaaaaactctcagggcacttactatgattgtgtaaaagagagactcatcaattaacacaggtactggcaagtgcacttcataatgcctccatttctagacagatcaaaaacagtgtgccctgtcaataaatgctgagtttctgtagcagcctgattgagatcagctaacctttaggccaaaagcgggattcttccttgctgaagcttttggcaaagcatattgagcttcatgccagggattagattaactcttgcaaaactggttcaccaggaacaatgactcagtgttttttttttagtatccggcatattgtgtggagcagctataaatatatttacaagctggagtttcaagggaggggagtaatagcttgctgaaaaacatgccaactgagttatgggtcttcacgcagccagcatgctgtgttttgggctctgcctcttgtaatttttagaaattaattagtttattctttatttatatttatttatttatttattttcagatgggatcttactctgttgcccaggctggagtgcagtggtgcgatctcggctctctgcaacctccgcctcccaggttcaagtgattctcctgcctcggcctcctgagtagctgggatttcaggtatgcctcaccatgcctggctgatttttgtatttttagtagaggcagggtttcaccatgttggtcaggctggacttgaactcctgacctcaagtgatccacctaagggtactgggattacaggcatgaaccactgcacccggcctgttggttgtaattttattttcctcctcaaggactttgagcacattatcttctctttaataacttgtttccaccctcctttgtgcacgcgcgcacgcgtgtgtgtgtgtgtgtgtgtgtgtgtgtgtgtgtgtgtgtattttctgatctccctacgggggcagagagtctcaagcaggtatgtccatgttattaacatactgtctgcttattaactaactgcaccaatgatgaaagccaactgacaaacaagtgatgctcttatccctccttcgcaagcaatgaatctgaaagccaagagaagttttcctttcaacaggaagtgttttggagtccgaacaactctgcatttagacagtgcagcttttagttacagatcttggcaatggggcaggcagagggagcggcaactacagactttgccgtaggactgttttctatggagtgtgtgtgctctgacgagctagtgacaggagggaggttacaaaagcatttactgaaataaggatttctaatagaggagctttttaaaagtattaaatatgctaatgtgcctagggcatagtcaacaaagagttataatacatgtcatttttcatatttatcaaggaaaccatgtcacccgcagcctttctcaatttctggcattctgagaaacacactgtagtggtgcctgagggtctggggaaagaagaatagaatgaatggggcatctcagaatcgtaaactcccccagttgtagttcctttcgatgttggtcgttggatgaatttccagtttctactattgtggttggattggggagagtagctcaaattgggaattgctttttgaggatctagggcttctggaattctcccagtttctttttacctctttatgctatcttgtctactttgaaaaatcagtagcatccatttgattgcagagctgaatctttctatacagtgaggagttgtaatcacattacttataacctgcttatttaactttttaaaggtgcaagtcattgtaacctaagtatttactcacactgatccttaatatactcccctttcttatctgcaagcttctttctctggtttctcctaactctgttactgctcatgagtttaaaactttgtcttctcagttcctggcttcacctgtttggtctctgctctccaggactctgccttggaaatctgactcacacttctatatgtccctggggctcaacttcgggcctggcgccagaatcacccaggctccaagcaagccttgtagactccactcagtcctttgactcaaggaaatctccacttctaaatggctctccggttgattctgatgccagtccagggttgagaaccaccgctttagcttctagacacacagccccctcccctttttcctggagcccctcttgggtcatgattctattttccctatttctgtactcagaagggataaaaatggaagtgtatgtgaagttgctactacgtcccaggtgctttaaatatgttattttattcaatcttcacaacagtcttatgcagtctctatttttattttaagaatgaggaaaacaatacttgggtgcagtggcttatgtttgtaatcccagcactttgggaggccaaggtgggtagatcacttgagcccaggagttcaagaccagcctgggcaacatggcataaccctgtctctaccaacaatacgaaaattagccagtctcataacctggtctataaataaataaatagataaaaatttaaaaataaaataatttaaaaagaaaagaatgaggaaaacaagattcagagagccttggtcatcttcccaaaggtgcacaattaagaaatggctaagcaggggttctgactcagatctgtcagcatctacagctttgctatttaaaagagcgtggtccgtggactagcagaatcagtgtcacctgggatcttggtagaaacacaaatacttgagtgccatctcagacgtactgaatcagtttcttcaggggtagggtccaggaatatgcattttatgaaggcctctaaatgtttctcaaagtttaagaagcatggggaactatatcttttcctactatatagtcttatctctttccttgtttctttactccaaagtattgccttatttctttcccagaaacctcactatcagctcactgtgcagccttactcatatcttcctcaaccagcagttttattacacacacccttctcatttcctcacattgctcatggtatctgactgagtacagggatccaacctggctttgggttttgcactgtcttgcctcagtctcttaatttcttcctatgtacattttaagatattgaagacactaacttccaaacctcttctctaaatctgacagtgaagcagtgtgtgtgtgtgtgtgtgtgtgtgcatgccagtgcatacaccacacatacaagcacatacacagagttaagtttggtcacatttacttcattaattgatatataccacaactgagaaaaacttactggcattctgctccaagcttgaattcccagacgaaaaacaaacaagcaaacaaacaactcctccttacacaaaaatatctagtggccttggaaaattccatttaacattaaattgtgtctcttcaaagtgaagcagggtgggcagatttttgaacatgaatctactgataacacaacacctcttcaaaactagaatctcattcagggttaaatgatgtccaagtcaaacctgagatgctagcatgatgccccatcctcagtcagaggtttcagggtggcaaacaacttttgctcactctcctctgcctctctctatatttgcagaaagtccagctttcactgcaaaagttcgataactctgtaaaacagtttgatcctaacttcaaaagaatttttatgctatttggaatacataaaaaatgaatttattccaatactttagccccataaataatgcataatgattggtgaaagattagcattttggagttcaagtacttaaagctttcttggatggataatgcatcacccttaactagcataaggggaaatagaaggttgacaaggaaaacttaatttagggttctttatttatttttctctagttatgtttaccttcccaggttgttttattaatgccacttttcacaaggatatttcatgaataaatatcaggttgtatctctggccatctgtgatgatcacgtttttatttttaatgagttgctcatggattatatcctaactggaattgcagtcagtatattgagatgcattgactccatttctgtctttcattcttctttctcaatgtattctcactggattagcactcttagccctgaggactcttgggccagttttattactaaaagaagaattacagttttgctacacagtgaccttgcaagaagtatcagcacagctcaatttcaaattctcctcaaatatcaaatatgttcttggtatattttgcttagcagtttattgccttctcatctccactgtttttcctgagtaacagctcagaaatctataaataaaacttaataatggggagtgactcaaaagtctggttatttttattagtaaactattttaggggtgaacacttcacattttacattctcatgctccacagtgctgaaaatagtctgaattttttttgtgtgttaggttgatgagaatatttttgagatgactagcagaaaacagaatcattaaaacagtgctatcagttttcatgttgaataactttacaggaaatgatagcatctttttttctttttttgagacggagtttcgctcttgttgctcaggatgaagtgcaatggcgcgatctcggctcaccgcaacctccgcctcctgggttcaagcgattcttctgcttcagcctcccgagtagctgggattacaggcatgcgccaccatgcctggctaattttgtacttttagtggagatggggtttctccatcttggtcaggctggtctctaattcccgacctcaggtgatccacccgcctcagtctcccaaagtgctgggattacaggcgtgagccactgtgctcagccgatagcatcttaacaataaacatgcaaagatttgtaaatgttggcaaacagcaagaaaaacatatttagaaaattgtgctatgctttaatgtcctgtctgtacgataatttacttagctccctaccttccccccagcccaccagaatgtttaaactgaaatttaaagcacagttgatcttggcttggataggcagcctgcatattaactgaggatttagttagtatccaggagcagatctacttctcaaagtgagattcacatagcccccttggaagctttcaaatagattgactagccttttaaaattcctcttctcccctttcttattgcccccgccttgtctagctgtatgctaacttgctgcatagaatcctgaatttctggatttctacatttctagctcaatgaatggggtaaatcaaaacttaataacactcttgattttgaaaagcttcagtgcttcatgtaagactttttgagaaaagatcattttcatttatttctgttttatttctagcttaatgattaaatgtaagctgttcaatacctttttcaatatcccacttgttaaacccacactaaacctcagaaatattgagtcagtgatctaaatttccattcaaaatttccacaaagcagaagcataaatgttttcattgtcattacaaataaacagacagggctgggcgcagtggttcatgcctgtaatcccagcagtttgggaagctgaggtaggcggatcacttgaggtcaggagtttgagaccagcctggccaacatggtgaaacactgtctctactaaaaatacaaaaaaattagctggattggtggtgtgtgcctgtgatcccagctactcaggaggctgaggtaggagaatcacttgaacctgggaggcggaggttgcaatgagctgagattgtgccactgcactccagcctgggtgacagagtgagacttcatctcaaaaaacaaaaacaaaaacaaaaacaaccccttcccctccacgaaagaaaaccccaaataaacagacaaatgaaagcaatgaaaacaggaaaataattttgacacctacttctgggatgttatgttatgctttgcattggttctatttattagacatgttcccatctttattatttaagagcagataaaataacctcactacattaatctcttttgctctgcctctttccatatgattcttcactagcagttcccaaaacaaaaaaattgtgcaccaaaatcccaactgagactcaattgtttgctgactcaacaactctaatgagaaatcttatacaagagcttttgtttcaaaaggaagtgccaggaaaattttgcttccctcaagcaatggcatgttttctttttctggacagtgagaaccatgtaattaaacatattttcctttgtgctttggctgtcaggaaactcagagccaaacttgtagcccaagttttatggctatgtaagacattatggcccatatatctggactcttcctttctccttggtattgatcttcagtcttggctttagtttacaaaatatgccattataaaaaataacagtatctgtaggctgtctgaaattattatggaaaaagtagtgtacaaataaatgaataagtcaattgtttgaaaaacaatgcatttgtatcagaaataactttgtgagtggtcttcaggttcctagtctatttcattttgatatatatttcttgtgggtttaccacgtgccagacaaagatgttcctggcaggggggttaataatgttaacagtactcagtctttctagtgccttacaggctatagaaggagaaagaaatacaaaacaaactaaaataggtattcaattgcaacaaaagcaacttgatgtaggggtacaggggaaggaataattcattctacaggcctttaaaagataaagaggtatttcaaaggcaaacaatggagagaagatcattctaagctaaggaggttgcatgaagaaagcataatgtcactacttttttttttttttttgagacagggtctggctctgttacccaggctgtagtgcagtgatgagatcacaggtcactgcaacctccaccttcagggctcaaaccatccttccacatcaacctcccaagtagctgggactacagctgcatgccaccatacccagataatttcttttattttttgtggaaacagggttttgccatgttgctcaggctggtcttgaactcctgagctcaagtgatctgcccaccttggcctcccaaggtgttgagattacaggcatgagccaccgcacccagcataatgtcatcaaattgaagtgagaaatgggaatgtcactaccaaccataagtaataaacaatagattatcattaactttgctcctagagaaagacaagtttatttagaggtgaggcgagtagaatttttttaagggaacttctgggtaatttaacaccatgatccttctcgaatgccttacaacgtaaaaatgtagttctcctttttcttttcttttcttttttttttttttttttgagacagggtctcgcttcgttgcccaggctggagtgcagtgacacaatcttggctcactgcatcctccgccgcctgggttcaagtgattctcctacgtcagcctcctgagtagctgggattacaggcgtgcactaccacgcctggctaatttttgaatttttagtagagatgaggttttgccatgttggccaggctggtcttaaactcctgacctcaagtgatctgcacacctcgacctcccaaagtgctgggattacaggtgtaagccaccatgcctggccatttttcttgataaaggggtgtcattggggcttctcttactcctgtcactcatcatgggtgccatgtcttttttttttttttttgagatggagtcttgctctgtcgcccaggctggagtgcagtggcgcgatcttggctcactgcaagctccacctcctgggttcacgccattctccggccgcagcctcctgagtagctgggaccacaggtgcctgccaccacgccctgctaattttttgtacttttagtagagacggggtttcagcgtgttagccaggatggtctcaatctcctgacctcgtgatctgcccgcctcagcctcccaaagtgctgggattacaggcgggagccactgcgcctggcctgggtgccatgtcttaattgacaaccacaatgaagagaggaaggaaagaggaaagaataagacaatacaagaagaaaagggaaggaaaagccaatgacagacattaactggattttcccacaaagagaggtcatgaggatcaagagcatacagaagtttgcaaaataaagagtttctctggcttggagttgaccaaaataagagaaaggtgaagcgagtataatgtacggagacttctcctgggagaagttgtcagtggagaagttattgggtcatatagtgatggtgtgcagataggacctggtggtgagttgacgaggagccattgccattcagccatcaagaatcatgatgtgtgttgtgtaggaatggagaggtgagtgtggagtggatggggcgtagatggagaagcaggaggattcgtcatgcaccctgaggcttgccagtattgatgtcagacttcctccgaccgtgttgccaccctggactgtttgactttggtagctattttaaaacagcaagaagagctgcttgagaagaacctgggggagatttcacaaccagcagctgcatcgaatctccctggatgtgtgcttttggaaacaatttacacaagggctgatttcaacatgcactaatatatacagtttagctggcattttatatggaaactttaataaaatggttctaattagtgcttaatttacatagattagagagttctacaggcccacacagtagggcttggggattttatgtcatttgatggagatgccagtttgattcagataaagaaccaattttagggaatactgctgaagtttgcccgacacaaatgaaggagttgtagcttgcatttcttttacccactcttgttcagtggcttgaactagctttctgtctcttccacaagatttaggacaagatggatttctgtgtcagcatgtagtaggagagctttgattttctagttctgtcctgtgtggatctgtatgtagctcagattcccccacaatctaggtcagagaagctgctagccttggtgcaaagttttcaaaaaggcttctattcagagagatgaataaggaaaaactcacaccctacgtgcgaaggttgcttaatgagaggtgtgagatggagctcagttgccacttatctctgtagttgggtaccgttgtgcagtctgtgcactgcccagccatttgcagtgaccccaaagaggatcatctggtcatcttgcggggagagactgtgagttcctgccatgtcacttggtataacatgagaaaactcaaaactctaggcagatctttgcacctgccctacttttctacctgctctcacaatcttcttgagggtgaccagagtccaagtaactaagtgtaattcaatgtggtgaatgatatgattgctacacaggagtatctattaaggctttcaaaatgtaaagaggaagtgactcattcttcctggtggtggtggttgcatcaattggtgtagtctattgcctctctcccatcaacaagggacatttggcaaagtctggagtgtgtcaactgtggggtggtggtactaccggcatctagtggatagaggtcagggatgctgctgaacattttacaatgcccaggacagccctcccacaataaattatctggcccaaaatatcagtagtgctgccattgagaaatctggttatgtaacagataactttttttttttttttgacatggagtttcactcttgttgcccaggctggagtgcaatggcttgatctcgactcactgcaacctctgcctcctgggttcaagtgattctcctgcctcagcctcctgagtagctgggattacaggcatgcgccaccacgcccagctaattttgtatttttaatagagacgaggttttaccatgttggccgggctggtcttgaactcctgacctcagatgatccacccacctcggtctcccaaagtgctgggattacaggcatgagccactgtgcccagccaacagataactttttaaattctcagctgtttaacccaacaaataattattttcttcctcaagctgtatgtccagcatgggttggcaacatagccctgtttttcctagtcccttcaagaagtctattgatggaagatgcatttttatgtgggcttctaccaccactatgagagggggaaggaaatttgttggattgtaccctgaattttaaaaagcttctgcccagaattgacatatattctttccaattgcattttattggccacaatccatcatatgaccatgcctgaattcagagggagtaggtggagaatacatttttaatttttaattttttttttttttttgagacagagcctcactgtcttgcccaggctggagtgcagtggcgccatctcggctcactgcaacctttgcttcccaggtttaagtgattctcctgcctcagcctcacaaatagccggaattacaggcatgcacccccatgcctggctaaggtttttcatatttttagtagaaatggggtgtcaccatgttggccaggctggtctcaaactcctggcctcaagtgacccatcctcctcagccttccaaagtgctgggattacaggtgtgagccattgtgcccagagagagtgcatttttgtcttgtacccagaaagaggagagagtgagaataatcatgaactaccctaatgactatcatgctgatggtaatggtggttgtaggatggtgtgagaatttaaagacggcttcactcctgtcactttgcttacttactgctgtataacaaactgccccaaacttcagggatgaagctaacaaaaaaatcatttaatttgctcatgaagttgcaatttggatagggctgtgtagaacagctcctctctataccatggggcatcagttaggacagctcaaaacctgggagtaactcaaaggctgggggctataatcatctgaatgcttgctcactcctgtgctctcatgtcaggcagtggatgctggctgtagacagagacctcagctgtggctgtcagcttgaccacctactcccagcctctacatgtggctgtttggctcccttacagtatggtggctgggttccaaggcagaaagtaaatgctgccagtttcttaaagtctgtctgcaaattggcacagcattctttctaccatattctattcatcaaggagttgtagaggccaattttaaggggaagaaaaatagaccctatgtttcaatagcaggaaggtcaaagaatgtggaggccccagaaaactgcttcccaggtaagtgacaggatagaaaaacaagatttttttttttttttttgagacagggttttgctcttgttgcccaggctggagtgcaatggcgtgatctcggctcaccacgacctctgcctcctgggttcaagtgattctcctgcctcagcctcccgagtagctgggattacaggcatgcgccacccagttaattttgtacttttagtagagacagggtttctccatgttggtcaggctggtcttgaactcccaacctcaggtgatccgcctgccttggcttcccaaagtgctgggattacaggtgtgagccaccatgccaggccagaaaaacaagacttctttaggtggagtttggggaatgagctttctggacaagtaaacggcatgcatcaaggcacagaaacatcagagctgcatttgaataaattctcctagctggtcttacctcctagctacttacttctactgttgacatcaaccttataaacttgctagaggctcagtgtggggaaacaaacaaacaaagcctcatgaaacgttttgatccaattagaaaatgtctattaaatacattgtgtttcacaaatgtgaactattaatacaatctgggtttgttccgatttaattgtctaaaattatacataattcatcttgccaacaaatgaaattattgaaaaattaaaaatatcaccaccaattttttctattaaatgtatatttttgtaatgatagcttaagtttcatctcagtttgagatttagtacactgtggcattcactctggttggggttcatttggctctgagcttcaaggttcaatttagacttcaaagcatgtcggacttgacctgaggcacgtttttaacaatcaggtgcagtttgtaaggttatgggttgaggaatagcataaatgggccatcctttttctgattttgagaagagaatgactactaatacccaggtgtgttcttgtctttcttgagtcaattctaacagcattggctgtgggttataaaaccataaaattttacagccaaaaacaactttaaaggtcgtttagatggaacttcttcattttgcagatgaggaaactgagaatcagagacaaagtgacctcagggcattacaacttactattactatattgaaagaggaagggaagctggtgcaagttgagggacccactgatgaactgcagggtatccaatgttgcccctgtgtttgggctgagggagaagcagcttcttagcttctgctatgctgacttatcttgtgatctctgtcccagcccttggctgcctctcctccttgtccccaggcctgcaccattccatctgcctcctgattattcactgacagctgccttttccctcaccctttgttctcagtttttaaaaatccaatggggagaagcttggattcaaatgatagcattttcagctcatgaaaaattctataacaagtgtatttgaccgtttgatctctggcttctcccacacacttgccctttatactctgacagccataagcttcatttccttgaagcagattgcaatttcaatggaaaggaaataattgtgtagctttcaagctgagttcagttctaaaaaggactgagcaaagctcaatcctgggctattgtagaatcttagtcactgaatcaggcagtgaaagagctctctccaagcttcatggttatgatcttgaaaaacaccagagctaggttcaaattccagccataccatttcctaactgtgtgattttggcaaatcacacaaatacttaaaattctttcgactcggtttcctcttctgtaaaatgggaacactaattaatgctcacctcaaaaggttgttcattcattcaacacatattcgttgggtgcctcctgtgtgtcaaactgtttcagtccagtgaggaagatggacatgaatccaagagtcaccaaaaaaatgtaaagtggcacctgtgatgagtcacaaaggggaggtatatgagaaagtgtgtgacagtatctaacaggtgagggcattatataatttattgttgcaaacaggacatttttgagcatgtaagagggtgtgttaattgtcctggaacaacaggcataaatcaggactttctgggcaaactcaggccctaccccactcttacctacccttagtataagagggaaggttgggaaaggctttcctggggaagggaagaagaaactgagatccgcggaataagtgaggattcctaggcaaaaagaggaagacagagtggtttaggccaagagagcaaacagtggtgcaagactctaaggcaggacaaagcatggagcctgcagagaacagacagaaggtcagtgtgatgaagatgggaggggtgcgtggctttaaacacaggccccttgcttgttggtttgccctgtaggtgttaagaaatgaggctatatcaaggtgaattttaagtagaggtggcacctctacttaagaccagacttgcagctttaaacatcagtctggctgcaaggcagaatggattagcattgagtagtagttctggccttggctttccagaggaaacttctaaacaatatcaaagccttggtgtcacccacagagatcctgatttaattagtttaggttggctcccagtaggttataaagtgtgtcaggattgagattcactgtagaaggaagtgtgaatatggagaagaataattacaaggctattgcagtagcccgggtaagaagtgatggaataggttcatggcagtgggtttctgaagcagtggttctcaaactgtagtggatttgagtatcacctggaagtcttatttatttattagagatggtctcacactgttgcgtaggctagagtgcagtggtataatcatagctcactgcaaccttgatcagccttcatctcctaggctcaagcaatcctgccacttcagcttcctgagtagctgggactacaggcatggaccaccatggctatttgtttgtttgtttttaatagagacagggtctcactctgttgcccaggctggtctcaaattcctgggctaaagcaagcctctctccttggcctcccaaagtgctgggattatagccactgcaccttggcacggaaaccttgttaaaatgcagatatctgggtatcattgatttagtaggtcgtggatggggcctgagaatttgcatttctgacaaattacctggaggcgctagttgctagtttagagatcacacttagcatctagtgggtagtggtcagggatgctggtgaatatcatacaatacacagaacagcccttttgctgatcactgatcgagcaaaaaaaccatctgatgtggtagataacatcaacaggatttgatcagcagggtaaaggacaactccaggactcttacagttttctgaatttcacaactaaatgacgagtttcactattcattgacattcaggagacagccctacagacctgagaagatggtgaagtcaaagctacacatatatttgagggttacctttgaaacagctaagaggatacatcaagcaggaacatatatgtggaacctggaagggaagatcattacagatataaacttggggatcattaaagccaggaacttatcaatggcatcagtcagttctcttttcttttactcttatcattggtgtcaaagctctggcctctttttgttggttccactcaggtgccgtgatcctccagcctcagcaccttgctgtgagctctccttgggaggctgcctctccctcctccttcagaatttaccccctacttctcctttgggtcccacctctcaggcttggtcatgtgtggcattagcaagcaggtgtgcgtgtttccttctgaagcacaaatcaaagccatggttatgtatctgtgggattatttgctaaatggccacctctcctgctagattctaagttgcctgcagtgactggagaacatccctaggtatcagatgctcaatgtcttacacttatggaaccgtcaaagacagctgttaaatgtccaatgggtcagttagggagatggtggttgttaaaactgtgatgagttctcaggaagagggagaagcagttacctttgtgaagcagttgttggtatttacttagtaatgagattaaatttcctaggacagtgggtgtgtgaaccagcaatagcgccatctgctggaagtaagtgatacaacaactattatcttgactaggctcagggctgttaaaacagtattgctctgggagaaaagaatcattttttttaaggttaaaaatgtgagtaaaattctttagagtgaagatagaatttcttttgaaatggttggaaaaattggataattattgaaaatagtgttcagttttcaaagaggagagaaaccttcaagtcactgtaattaagagaagttttattgaaagaacacatggaataaggaagttagatatctccacccaaaaccagcatttcagaaaacagaaacaggcaaaaatctggcggagtgtggtggctcatgcctgcaatcccagccctttgggaggccatggtggaaggatcgcttgaagccaggagtttaagaatagcctgggcaacatagtaagatccccattttcttttttcttttcttttcttttctttttttcttttcttttctgagacagagtgttgctccttttgcccaggctggagcgcaatggcatgatctcagctcaccacaacctcccgggttcaagaaattctcctgccttggcctcctgagtagctgggattacaggcatgcaccaccacacctggctaatttcgtatttttagtagagacgtggtttctccatgttggtcaggctggtcttgaacgcccgatctcaggtgatctgcccacctcggcctcccaaagtgctgggattacaggcatgagcccccgtgcccagccccaagacccccatttctattttaaaaaaaaaaaagaagaagaagaaggaaaagaaaagaaaaatggaaacaggcgaaaacctaggcttctcaaagactgaagggtattttggaactgactggatattgctcatctctggctggttgtgttgcagcctcgttggtggcaagtgcagaccctcagtcagtgacctcctttgttgctcttccatcaaagggcccccttctcctgcccaggcatggtgttactaatatggcgatggtaggggcaggggctgcatctatgacggggagaggtatgagagtatactcatcattctgctgttgtctttgttagtttgtttctaatttctattgttggggagaaagataaattcttccctaacctcttgggatcttcacctgggtctaagaattaaatcactgtaagacaggttaacaggagaaaaatatatgagttttattgatttttacatgtacgcggagaccctcatgagacagcagaagacctgaagaaatggacaaagcagaaagctctaataccttttagacagagaaaccataaattcatgaagagctgacaagacaaaggggtttgggccagtggcagtaaattgtgggaattcactagggaggtgtaaagatagaggaagataagggatagtttagaaagtttatttgtacagctccattgcagcatcaactcccagtcaatggtgataagagttattttcttattctggtacagggagggcaactttcttaaataaatctttttggcttacgacaggtagaagagggcagatcacatagccctttccggcatctgctgtttctcaggtgactttagctcaaaataatcaacatgccacatcagcaaattttggggtgacatggcctgtttcgctatgataatgggaaagaaatcagactttttaactttgaattagaaaacacaaactttgactatgtcccacaatttatgtgactgatttcatattctatcacatctattttatattctctcatattctcctcatgaattttcccctagaatgttgggggaattttgaaatgacttggggggcatgctacaattcgaaaaggagagagacatactctccaattctctccctgcctgcctcacaatgtgcagctctcctctgcttcttcttcttcttttttttttttttgagacagcgtctcactctgtcacccaggcttgagtgcagtggcgcaatcttggctcactgcaagctccgcctcccaggttcaagtgattcttctgcctcagccttccgagtaggtggtactagaggtgtgtgccaccacgcccagctaatttttgtatttttagtagagacggggtttctttatgttgaccaggctagtctcgaactcctgacctcaggtgatctgcccacctcagcctcccaaaatgctggaattacaggtgtgagccaacatgcctggcctcctctgcttctgattcaactgctgctaccgatagacttactgaaggatttgaagccaaatggtattaattttggtcagttacttccctgtatctggtgtcctcactagacagaacttctgtgtatggctacttcatagaccccgaccagcctacatattgtttgctctaaggtctagtgccctctcttatttcactaagatacagccactgttggtgggggagtcacataacatggaacataatcactgtatcagttcaggtgctcttgattcaagtggatttaattatgagggaatttattccttacataattactaagtctagcattagagtggcctgcagatgagggttgatccagtggctcagtgatggccagaacgctgtttactttttccattctgctatctatggggttggcttcatcctgaggttgttttcctttctgtcacaggttttacatcaatggggtaaactagtttacattgtggtaacaagcaactctcaacttttttttttttttttttttttagactgaatcttgctctgttgcccaggctggagtgcagtggtacagtcttggctcactgcaacttccgcctcctgggctcaagtgattctcctgcttgagcttcctgagtagctgggattacaggcatgcaccaccacgctggctaattttcgtatttttagtagagatggggtttcttttttttttttttttctttttgagacagaatcttgctctgtcgcccaggctggagtgcagtggcgtgatctcggctcactgcaacctctgcctcctgggttcaagcgattcttccgcctcagcctcccaagtagctgggactacaggcgcatgccaccacgcccggctaatttttgtatttttagtaaagacagggtttcaccatattgaccaggctggtcttgaactcctgacctcgtgatttgcccgcctcagcctcccaaagtgctgggattacaggcgtgagccaccgcgcccagccaactctcaactctagtagcttaagacaacaaagatttatttcttgctcttactgtctgcccatctgtatcaccttctctgcaggacccagtttaatggagcacacacagaaaaaggtgctggtcactagggccaagggaacaatggctctggaaggtttttcttgaacaattcagtgttccagtcttggagcaatacatcttatttctactgttaaatccatggccagaactaatcatgttgtcccactcaccacaaagccatatgcagccccaccatgtgctcaggaaagaggaatgggaagcatttgatgaacagaaataatgacttcaacaattgggactatcagttcacagtttcaattgtaaaaaaaaaaaaaaaaaaaaaagacagaaatagaaaaagaacaattgaaagtacttgctttctcatccacgaaaaaagttggtcaaagcctcttagtgtaagtctatagcagatgatgcctgataaggaattgtacataccgttcttcgtgaaaaccaagagtaccatgtatgtaacatagttgctttgggcttcttatagcagttaagagtgtatcagcaggcctccatggtatttgaatgttaaaagctttcattccccctggaagaaaacacatagctaactaaagaaagaaaaaagaagggaaaaagaacaaagaaaaagaaccactagagtctctgaaaagagcttatgagatacctgactgtctgcgccttctaagtatgtaccatgaaaccttagattcctacctcattttgtgatggtgtagaaggcacattggccaccagcaacccttgtaaatatttgcggatttgaatttcacaaattgaaacccagactgctgagggctttgctgctaacgtcaaagagctggggcaactaccacaaaaccacatgtgggagactttttagatgaggagataggaaattcctaataagaaaagtttttttgtaaaatactttctaatgctggctctttagagaagcacattttacatgtgcaatggtgcaaagtcctagcactaagatttcttcactcacagaaagaaagaatgatgcaggtgctgttcacatgcggccggaaccatgcccttgccaagcaggtcagcggggcacagggactgcgctcctcatgatagtgcagattggctcggaagtactcaattctgtggagtcacagcgccctctgacagatttcagtttctggaaaaggaagggcccccttcagggtacctgctgttcaccttccattagattaaggttgaagagcgagtggccatttgtaggtactggtatgagatgttcctagctacccgcatgtcagccccgggaaacggcaacatttcccacccttcttaccctgggtcctgagtaggaataaaagttagtgattcttaggggcatattgagagctggcaatgatacctctcacaaatccatcccccagagataaggggtcccccatgcctttgatgtatttgggagctgtgctgtatgtgttctctttggctccccagtggagaataataacaataacaaccgcgtactaatacaacccagatgtcagcacagaccctctgttctctgtcttccctgagatatctgtatcttctcagggattactgtcggttcaggcctggctcctgctttcagcttgtgggaaaactcactccatcttcattccataacctcacatctcctatgccagttcccttctctgtgctccatgctgaaccaaatgccacactcatcccctttgctttgaattatatgaaaaaaagaaaaaaccctcatggggactttatgtgtaacagtcttcactgcacatttgataacacagatgggggtttatatcctagcagagcagatattgtcaatggaaaatggaaacaaaacaaaacacaaaagacaatcttcagccatcactatgtagcttggctatcatcttttgctttctcctttacttctggagtccccccacataccctcagaaatggagatagactctacatcaatctctgctctgggaaatctactcacatatccaaaggcaaactaacaagctcttgctccgacaacccatcgacttggggtctcatccctccctgcctaccagtctctgtgactgaaaggggcccatacagagacttattttcccaggaacgtgaatgatatccttctcctgttccttgaccttgggaggcagatttgattatggtcagctttgattcaaagtaagtttttttttttttctcccttaggagaatgttgtgaggtgctgattgttctctgcttcataatcgtatcacttattactgataatctttttctgcccccagaggttgctgaagaatgtagcatatacagtggacacagagccctgataatacaattactaaattctccaaggttgagggcctggtcttaggtcatgagattactgatccttgccttctgcctgctaggaaggcccaactaatttcacagtctttatcagtgaaccatagtaaagggggaccagaagagaaaaaggttatgtcttttgggaaaatgccaaaatcatattgtgaaaatccttcctactgttcttctcatgggagggggaggactttggacttgtttctctccttttcctgtacatttggggatgtcagaaccgtctgtttcctcatctacacgtggttagatgccgacaacaatctcttctcttaaaattgcttactattagaccagcagagtgtttggtattaattgagcaaggaggaatttgtaggaaaggcttggcttaactaggagagggaatgccagggagaaatctgtatttcccactatttttttttctttttttgaggcacagtttcactctgtcgcccaggctggagtacagtggtgcaatctcagctcactgcaacctccgcctcctgggttcaagcgattctcatgcctcagtctcccgagtagctgggattacaggcgtgtgccagcacacccagctaatttttgtattattagtatagatggggttttatcatgttggccaggccggtctcaaactcctggcctcaggtgatctgcccaccttggcttcccaaagtgctgggattacaggcatgaaccaccacacctggccatttcccactattttgttgataaagacatttggatttccctgcattaggcagatgtggaagaagatggaagcgatgaaaaccttcttgccaaaatctcccaaaagacctggccagtgggtgagcagatctcagttacaaaaagcctataggttgaattttctaagaaaaggcctggggaggaggtaccaggagtccaaattgaagttcgattttcattatcacagattttcatatctctctatctccctttttttgtttttggtgagacagagttcaagaccagcctggtcaacatggtgaaaccccgtctttactaaaaatacaaaaaattagccagccgtagaggcgggtgcctgtcatcccagctactcgggaggctgaggcaggaaagtcacttgaacccaggagatggaggttgcagtgagccgagatcatgccattgcactccagcctgggcgacaagagccaaactccatttcaaaaaaaaaaagaaagaaaaagaaaaaagaaaaaaagaaaatgcactttttgctgtcagtaaaagttaagcaaaagtcttgctgagagactgatatttaaataactattataatgcaatgtaaaattactgcaagagatatgaacacagtgctcaggaagcttagaggaaggagaaaccaagtccttagtgatggaaggtgggctgtcaaggaaggctttgtggaggttgtgtaattgtaggatgagggccatgtagtaggtcgacggggccctcgtgtgccaggtggaaggaagccatttaagtcttttaagctgagtggtggcatgattacaagtgcactttagaaaaatctctatggcagcaatgtggaggatgaagtaacaaaaatatacactttggttcattttgttctaaatggcaactttacctttaactgtgtacagagcttactgactatactcaagcaacaaaatgcacacttggaaatcctgtgtcacgtgcctatactagctttgtcgctgattcagcatatacacatcctccagtgtgacaggattgtgtatggaaacaggtaagactggtgaatactaggctgtgttcaagtgtagagtctcatgattatcaccaatactgtgggctctccctcttttagatgagtttttctaccatatctttggctttacaaaatatattaacacagtttcataatagatctcttggaatatggtcgtttggtgttaagcattctatctggcaaaatgaaaaataagatggtaagagttatcctacaaaaatcctaatgttctcaagctactgctgaaattctttttctagtaatttacaaaaaagtccccattttcttgtagaaataagccaattaaaaaaagaaaaaaattaaaataaaaaattaaagttcttaatgataaattatattaaaatttatttcctgttttaccctatatcctatgagcgtggttctcaaacttcgttcagtgcataccagaatcatcatgtgcgcttgttaaacagaggtctgggttccacccccagagcttctgattcacttcatggaatctgagaactggcatttctgacaagttcccaggggatgctgaggctgctggtccagggaccacacactgagaaatattgttctgaaataataacagctaatttttgttaggcagtttctgtgttccaaatacaggttgaatatcccttatccaaaatgcttggggcaagctgggtgcagaggcttattcctgtaatgtcagcactctgggaggctgaggcaggaggattgcttgagaccaggagattaggaccaacctaggcaacatagcaagacactgtttctacacacacacacacacacacacacagacacacacacacacacacacacacaaattgccaggcatggtggcatatccctatagtcccagctacttgggaggctgagggaggaggatcacttgaaacaaggagtttgagactatcctgggccacatagtgagaccctgtctctacaaaaaatatttgaaaaattggccaggtgcggtggctcatgcctatagtcccagcactttgggaggctgaggcaggtggatcatttgaagtcaggagttcaagaccagcctggccaacatggtgaaaccccgtctctactaaaaacacaaaaattagctgggcagtagtggtgggcgcttgtaatcccagctactcaggaggctgaggccagagaatcgcttgaacccaagaggtggaggttgtagtgagctgagatcgtgctcctgcactccagtctgggtgacagagtgagaccctgtctcgaacaaaacaaaacaaaacaaaaccaaaaaaaccaaaacaaaaaacatattagcttggcatggtggtgcattcctgtagtttcatatacttgggaggctgaggcagaagaattgctcacgcctgggccttcaaggttagaatgagctgtgatctcactactgcactccaatgtgggtcacagagcaggactcaaatgaaaacaaaaccaaaaccaaaattcttgggaccagaagtatttcagatttcagattattttggattttgaaatattggcatgtatctaatgagacatctcagggatgggacccaagcctaaacacaaaattcatttatttttcatatacaccttgtatacatagcctgaaggtaattttatataatattttaaataattttgtgcacctgtcacgtgaggtcaggtgtggaattttctactgtggtgtcaagtcaatgctcaaaaaattgcagattttggagaatttcagatttcagatgtttggattaaatgtgcttagcctggaccttacttgttgtagctcgtttaatcctcatggcaatgctaggacacaggtggttttagtataatattattacaaatgaagagcctgagacttgagaaagtaagacaacacactccaggtcactcagccaattagtggtgagcaagaattgaacccagatttgatatgcgaatgacttgctgtgattctcctattggtgattttttttttttttttttttttttttgagacagggtcttgctctgtcacccaggctggagtgcagtggcatgatctcagctcactgcagcctctgcctcccaggttcaagcgattctcctgcctcagcctcctgagcaactgggactacaggcatgtgctaccatgcttggctaatttttgtatttttagtagagatggggtttcaccatgttggccatgtggatctcgagctcctgacctcaagtgatccatccgcctcggcctcccaaaatgttgggattataggcgtgagccactgcacccggccccttattggtgtatttttatttcccaagtatgacacctgttcagagactttggaaccctgagaacattttgttggtgtgttttgtgactaatattgcctttttctgagatgaatgctgttctttgaaaaaacatttgtatttttagatagaaatgtacttcatccccagtgaatatttctgactttagagaaattgccaaacctgctgactcataacaaaaataaagagcatctactattcagtttatggcttttagttttgggaggtggtaggaggaaggatagattaccacccactatagatcattttattttcattttattttaatgccatttaccagtattgtgtatatggaggtggtcttgagagctttgtggagattattttttcaatagtacagatggctctgataaatatttaaggcatcttgggaaacaagaataccatcctgactcaggagaaattggtcacgtaaatcactttgtttcaagtgctttggcctctgagcatctcaaatggacacatacttcattggcttattaactcattgccggagtcactgaaggcccaaactacaacttcatgcctgaccacacaccaaggcttttttattgcttagttttctggctctttgcctattctgctctccctacccataaccatgtgagtatcatgtccagcaaactaacttactccttctctctccccactacacacacacacacacacacacacacacacacacaccacactccacacgcacacatacacagagcatttttcatgggtatgttgtcagacagatttctctgttctgaaggctcatctccttagagaaccttaccgtgtcaatgttgcatttagtttagtttagtgttgttgttgttgttgttgttgttgctgtttttaaatcttgctctgttgcccacagtggcgcgatttcagctcactgcaacctctgccttttgggttcaagcaattctcctgccgcagcctgctgagtagctgggattacaggcccccgccaccatgtccagctagtttttgtatttttagtagagacggggtttcaccatgttggctggtcaagtcttgacttcctgacctcgtgatccacctggcttggcttcccaaagtgttgggattacaggtgtgagccactgcgaccggctgttttttttttttttttttttttttttttcttttttgagacggaatttcgctcttgttgcccaggctggagtgcaatggtacaatcttggctcattgcaacttctgcctcctgggttcaagcaattctcctgcttcagcctcccaggtagctgagattgcaggtgcccaccaccatgcctggctaatttttgtattttagtagagatgggatttcaccatgttggtgttgtatttagttttaacactgttatcttctcagattgtaatgagagaacaggctatcatcacttggtgataaaatttcctgtaattataatctcattctcaaagataaaacattgatacctaatgtgcttttaactttaatgccaatttatcacaatggaagacatttcaaataaatactgtttttttgttcataaggtcttaaaaatcttgaatataactgcaaaaaagcattacatgttaaaagaaatcacaaaattagttaagaaaggagccaaactgaaagaagattatatttctatgcccttgaatctttacaaaatttagtaaaaactattaatatagaattatttacaagagacttctctatttaccagcccaatatcttcacatttctacaatctaaggggaggtgattgtggccagaaaagtttctgggctctggtattgcagttttcctgcacttaccaccatccggcatgttatatattttacttatttttcttgcttattgctgtctctttccacaagttccatgagcagagacagtttatctgtgttttttacggctattctcaatgtctgtaacagtgtctaacgtactatagtcattaaagaaatgctggttgggtgaattcagaaataaattagtaaataggtgaagcatgttggtttaatattcatcatcagaacttaaaaacagtttaaagaacctcaactgagttttgtacaataagtagtgacaaggtgggacagaggtaatttctttgtatctctgaggctttccatttcatgaggaacatagaataatatgtgtttccaaatgcagtgttcaatatctgaagagtatatatcatcagtatagaaaatagacaacacatgttaaagggaatgtaaaaattctagatgatttttaaggtatgtatggtttaatcaattgtttatatgctattctcttctcttaaaatgaaataatgcgaatgaaaaaataaaccttacaggtagtttctgggaaattcagacaacaaaattgtctaacatacgccaaaaacaatatagcatttaatgatgacatggattccgaaagacaaatcactgctcatcatattacaaggaatccaaacaactgaggggttatcatttatctatagttgcataacaaattaccctaaaatttagcagcttaaaacaacaatttattatttcataaatttctggggatgaggaatccagaagcagattcactgggtggttctggctcaaagtatcttatttgtttgctagggctgctgtcacagaacacaacagcacaggtgccttaaataacagaaacatgcattctggaggccagaagtccaagaccaaggtttcctctgaggtctccgtccttggattgcagatgcttgtcctcttgctccctcttcacatggttgtccctctgtgcacatgcacttctgtgtctctttttgagtgaaaatttataagcattccagtcagattaattttttttttttttttttgagatggagtctcactctgacacccaggctggagtgcagtggtgcaatcttggctcactgcagcctccacctccctggctcaagttcttctcctgcctcagcctcccaagtagctgggattacaggcatacaccaccacgcctggctaatttttgtatttttagtagagacgtggttttgtcatgttgcccaggctggtctcgaactcctggcctcaagttatccacctgccttgtcctcccaaaatgttgggattacaggtgtaagccattgcaccctgccccagtcagataaaattttaatctcactttaacttaatcacttctttgaaggccctgtctccaaatatagtcacatgaattagggccaagctgtatggcttcatttaaccttaattacttctttagaggctctatctgcaaatgcctccacattctgaggtggtgggggggttaggatgtcaacatatgaatttgagggggcacaatttagcccatagacacctgtcatgaggttgtagtcagctgtcagttggggctgcaatctcatctgatggattaactggggaaagatgggcttcccagctcactggtgtagttgttggcaggcctcagtttcttctcgctggagacttcagttcttgccatcggcttctccacaggttgtccagattacctaatgacatagcagctggcttccccaaaagcatggaatgggggttggggatgggataagagagagagaatccaagacagaatgcacagtcttcttataacttaggtttagaaataatatatcagtacctctgccacattctgttggtcacacacactaaccctggtaaaacatgggagtgaaccatacagggggaactggggtcattggtggtcatctttgaggctggctatggtaattaggtaaaaataaaaattcagtctgcagaaacgtatgtacttatgttacttaaaatattttaaccaattagtgaaaaatgactttgaagtatttttagctgctataataattgagtaggaattattttttcttggattgagttatatttactataaaaatacttactttttttgtcaaacacatttataagtgctgcaaatattagtgaccaatggtctattgctctaaataaaaagcaccaggagttagtatagtagttgactccagcctctggtgctagactgcctgggtttgaatatttacttttgcacttacaacttgtaacaacttgaacaatttattcaatctctctgttccctagttttctcatatgtcaaatgggagaaacaaataacatctgcttcatatggctgttatgaaggctaagtaggtttatatatatgtatgtatgtatgtatgtatgtgtgtgtgtgcatatatatatatatatatatagagagagagagagagagagagagaaagagaacttagaatagggcctggcacagagaatatgataaaagaatattatttgtttcctctttttatcatccagaacatggtgtaatgcccaatacattgtagatactcaataaatgtttttgtatgatccctaaacattgtctgtaaggaatttacaatggagtttacagtaaaaggtggtacatggtaggtaccatggaagcattacaaacagatgaccatgtgaatctgaaagaagcacagattgatttcttcgtcataaaacatggttgtatttgagctaaagcttagaactaatgaagattattgccaggcgtggtggctcacgcctgtaatcccagcactttgggaggccgaggtgggaggatcacaaggtcagaagatcgagaccatcctggctaacatggtgaaaccccgtctctactaaaaatacaaaaaattagctgggtgtggtggcgggcgcctgtagtcccagctactcaggaggctgaggcagaatggtgtgaacccaggaggtggagcttgcagtgagccgagatcgcgccactgcacttcagcctgggcgagaatgcaagagtctgcctcaaaaaaaaaaaaaaaaaaagagtatcaatgtatcaaaatcattattttaggctgggcatggtggctcacatgtgtaatcccagcactttgggaggctgaggtgagagatcacttgagcccaggagttcaaggccagcctgggcaaaatggtgagaccctgtctctacaaagaaaaaaaaaagattattattccccaaataggaaataacataagcaaacgtcccctatttcccccacgatggagctggagcatggtgtatgagaaggagagtcagagggagcaagaatgaaggggtcaggttggtaccaggtaatgaaatcattttaacataagactacatgatttggacttcattgtgtggtcacttcggagcattttagcaacaaaataatgtcttaggaagattaatctggtccaattgtaaagtaaattgagattcaggcttcaggcttggcttgatccaggattcaaataaaatcaccaagaatctgtatttcagatctgctttttttgtgtggctctgcctgtggctccataagaagcacagaaaaaagagaaatggtctgttaaacagaaaaagtgaaaaagcttcactcccagaaaatatcttcttgcatctcatcggcctgagttcactcatgttcgtattcttcaacaaattatcatgtccaggatatgaaacggctgcttggatccaggcacactgataacgctgataccacacctagaaaaagaaatgaatttcattcaaattccattctactattttaaggtttcatgtctagatggctggagattaagtgttgcagtccaggcgtggtggcccacgcctgtaatcccagcactttgggaggccgaggtggacagctcacttgaggacaggagtttgagaccagcctggccaacatgatgaaaccccatctctactaaaaatacaaaaaatagccaggcttggtggtgcgtgcctgtaattccagctactcgggaggctgaggcaggagaatcacttgaatccaggaagtggaggttgcggtgagccaagatggcactactgcagtccagtctgggtgacagagacttcatctcaaaaaaaaaaaaaaaaagtaagttttgcaattaggagacatgcctataatgtttatttagtggtgatacgtatggtttagtcctttaattatagtgtggtttaaatgcaaatttaaagtaactcaaatacagctattttttctcacatcatagggagactataaagtccctcagtaatcattcttcaaatagatatttttcttctttcatctactgccttcacgactgcagtcactttctccaacagtcttttctccaaataaaaacaaaaacaccactaccaccactaccaaaaatctcaagtacctgctatctctgatctttctcatctgctaatattctcttcctcccttactcccctcctcttttcttcctttcctccttccccatctctccatctcacacctccctctcttcctacctccctttctttcaaccttttccccttctattcttccttccctcgcttcctccttcccttccttccttccttccttccttccttccttccttccttccttccttcctttttgctattaaaaattcctcaaactggctgggtgtggtggctcatgcctgtaatcctagcactttgggatgccgaggtgggtggatcacttgaggtcaggagtttgataccagcctggccaacatggtgaaaacccgtctctactaaaaatacaaaaattagtagtgtatggtggcaccgcacctgtagtcccagctactcagaagggtgaggtgggcgaatcacttgaacccaggaggcagaggttgtagtgagccgagatcgttccactgcattccggcctgggtgacagagtgagtgagactgtctcaaaataacaacaacaacaaaaacaaactggcaatgcaggacttccttgaaagacagaggaaaggaaaagattaagagaagttataccaaaactctttttaataggtaggcagggaaaaaattgggaacctttatacatcaataattttattctcataatacttggaaatcatgactagctgttgctcttcttcaacatctaactattatcatttccacatctgattcaagcacttcctttttacatgtcttttttttttctttgcctgaaatattatttccttccatcaaattaacctttctgcccacctggcaaccctctcttcttcaagccttactcatcaagaagccttccctagcaacagggaaggctctgctaccaatcccacctttatgctctctggactaccactttgtcttgtacatttctattaaattgtaacttttcatttttgttacacatctattgactctactgctcagtgaactatttgagaccaggacaccattttgcatacctagcacaatacctaccacatagtagacatttcataaatccttattgattgaataaatcaatgatgaataacatttttataaatttcattttgtatttgagttgaagctccaagtattacaccctgttagagattttaaacttgatttttaaaatattggactagagcttaaaagaagattatattagtcaggggtctcaagagaaacagaatcaataaagtatacatttattatataattcattataagaaattggctcacatgattgtggaggctgacaagtctcaatacctacagtcggcaagctagagacccaggagaacctatggtgtagtccaggctcattccaaaggcctaagaaccaagcgagccaatgatgtagttctagtgtgaaaacctgcaggctctagacacaggaagaagccaatgtttcagttaaagtccaagggcaggaaacaccaaggtcccagctcaaacatagtgagacagaaggaattctctcttactcagccttttgttctattcaggctttcaacagattggatgaggcccacccacaatctgctttacccagtctactgatttagatgttaatctcatccagaaacaccctcacagacacacctagaataatgtttgaccaaatgtctgggcaccctgttacccagtcaagtggatgcataaaattaaacaccataaagactaaagcctgtagatgaatatctggtaacacctcacagaggagagacctaaagctgtgataacgtctctgaagccaagagagaaaggctagaaaaagcaagatctgggatatttccttagaatccttgcctgaaggccaagaagatgaggaagttaattttctcatccagagtggtggtatcgagctagaaaattgtgaagatctttctagttctaaaacatctgttacctccttaccttggggtttcaagactgggtaaatggaaatactaagataattggatgatgtaagaagattttggatgggaacaatatcttgttatgcaccagttgtatggaaactacttatttataagatttaaaattctacgtatattccttcaggaaatgttgtcggctttctacaagatgcagctttaattgtattattgggaaccatcattgattattaggttctttggagaaatttctttccttcaattagaagcacccatgaaggatatgaagaagagttggtcaaagaactataagaagatcatagaatgtactgcactatagaagccaaaggaagaggtaaatcaagaggcaagaaatgatggaaaggtattttgctatagagaggtaaaggttgataagacttgggaaaaaggccatcggattttacgattaggatattaaggacaagtttcagccaagtcatgagaaactgagcatcagttaggtccctgttgtttgatattatgacaatgtggtggatttagtaattagagtctttcaaaattgtctgttagtgctttgcagcttgggggcatgagcagagaaggtagggggcaggaggaatggggagcatgtctgtggctgagagttgaaggcttgaatggtaagagtaggcttgaggattgtggcttgttagaaaagacagcattaaaatatctgaacatgggactttgtttttagaaaggatacaaatgaagttaaaagccagaagaaggtcttgggtgggattttcaagctgcattccttggagtcttgaatcgtggattagagaaaagaccaccctgtgttgatctcagtagcttctcctgttaaacatcacagcacatgtgctttgaccagttttgtatattaaggctctatgtggctatcttctgtcccgctctgtcccccacggccattctctttccttcaccatgctgctctatgacccgggaggctgacctatatggaccatatcagtgggctgctttgccctcctgcttctgtttggattttgcccttggggagcacttgcatgagcttgcagggagggagaatgagaggcaaggtataatctgctgtgacctacagggtcatcaggatcctttccccttcaggcctagagttggtaataatgcccagctttcttaggcccttgaaatttctctataccctgctatatctgttcaattgcctacataacttaaccagtgtatgcttactactcactgcagccttgatctccctggcttaggtgatccttccacctcagcctcttgagtagctgggactacaggtgtgcaccaccatgcctggttaattttttgtattttttttgtagagacagggtctcaccattttgcccaggctggtcttgaactcctgggctcaagcaatcctcccaccttggccccccaaaatgctgagattacagacaagagccaccactcccggcccaaacattttttttttttgtaaaaagccaggcagtaaatatttttgatctgtgagttatacaatctgtgttaccaccacttaactctgctatctcagtgagaaaacagccatagatgttaagtaagtgaatgaatgtagctgtgtttcaataaaactttatttacaaaaacaggcagtgagctttgcttttggcccataggctataattgaaagacccatgatctaggacaagaagttttccatctactctatgagagtggttctcaatctgggataatttagctccctaagggacatttgttaatttaagacatttttggttgtcacaactggaggagtagtgctactggcatctagtggataaaatccagggatactgctaaacatactgcaatgcacaagacagcccccacaacaaaaattaccctgcccaaaatatcaatagtgctgaggttgagaaatgctggtcttgaagatgttaaaaagattgtcagtttgttcatcatatcgctgtggcttggcgaaaagaatcacagagttaattttataactatgaaggattgttaggagctgagtttttttctagttcttattttttaattattttatgatacttttcataaaaagtggtgtaagttgtgtttattcagaaatgtgattttttttttttttttttgatggagtttcgctcttgtttccgaggctggagtgcaatggcgggatcttggctcactgcaacctccgcctcccgggttcaagcgattctcctgcctcagcctcctgagtagctgggactactggccaccatgcctggctaatttctgtatttttagtagagatggggtttcaccatgttggccaggctggtcttcaactcccgaactcagatgatccacctgcctcggccttccaaagtgctgggattacaggtgtgagtcactgctcccagcccagaaattgatggtttctttagcaattttgtcacccatcaagtcgttagtcatattaatcctccataacttagtctttttgccccctgattatcttttgggtgggcagtgaaagtattcatacctcttttagcaaaacctatctcttcttggatttcctttgcttgctgattaagaggaaggactatctgtgaaagactcagatgtggctcaatggaatgaatgtgagaatggtatgagtgtgggtggtgggtgctgtgggggtcggagatgagtggctgaaccatccaaaaataagaatactgacaagcgtgttttcttgtgtgtgtgtgcgtgttgtgggaggagtgtaactgatgtggctagacaggattaacgaaagtctcaggagttgagagagactggggacattttaccaatggcgagaaggaggaaggatgacagctgggaaaattagtgattggaaaaggtaggctgggcagtgtggccatgagctagtccttttcattatattcttctggggctctatgtttaaaactagatactttaacatttcagaatgagaaagagaggaaaggatggtaactgatatgggctattatactgtgaattttaaaggagcctatatattatcctaaaactattgaacctgagcagaactgcaacgttggtattcttgaactgaactgatatttcctttgactaatgtccttgttcaatgaccagagaccatgacactccccaccttcacccccacacattgtttgtttgtgtccagtttgaagaacaatgacacatggaggtcagtgtttggatgatgtcataattttgatcagctggaaagcctggagtggccttgaagagatgcttaacttttggaaatcacttctttattgcaaccaaagctattaagtttaaaggtccataaagatgagataaacagtcataaaggccttttgaaattcatacttagtgtgttaaatggatttaattgctgttagttaaatgtggtgatgttaaagcaatgtctatacactggcaaaaatcagatcatcaactgcttaatgagggacacgtcttgagaaaaacagtggaagaaatgctgcttatatgtaatttgtgattaatttttgcaaggttttcaagggaataacttggccttaaaatattacagtgaaaaacagctttatacttgggtccaatcttcttaaaattagagttcatttttgctattagacaccttttattacaggataactttttcttcccccttggagacagagtcttgctctgttgcccaggccagaatgcagtggcgtgatctcggttcactgtaaccaccgcctcccaggttcaagtgattcttgtgtctcagcctcctgagtagctgggattacagtgcctgccaccatacctggctaattttttgtattttagtagagacagggtttcatcatgttgctcaggctggtctgaaactcctgagctcaggcaatccacccgccttggcttcccaatgtgctaggattacagatgtgagccactgagcccagccagttataggatagcttctaaacttacaatccttgaaatatcattttaggataattctgatcctgcataccagtgaaataagtataattgaaatattaaaccaaatttggcttcaacattaaaccaaaattaaaccaaattaagccagtatgttaaatacatagtttaatcttaattctagttaatatttttcatttcctatgtgtcaggcaatatactaaacaacttacatgtattactattttaattctcctggtaaactggaggggtgtgcaattattgtcatctccattttatagatgaagaaaactgagtcataaagaggttatgtacttggctgaaagtcacacagtcagtgatactgttggaatttgcacccagacaatttaattttagagcctattttcaaccactctctgagactgctttccttttctgtacttttgatgataaatgtgaaaagataattttgagggcattatggtgtattggatcttaaaaacccaggtaataagtcccatctatagtacaaataagctgcgtgatcttagggaaatcacataactgcttctgtaaaatgagagattacattaagttatttccaaaatgtcttttcgacttcaatgtggtgattccatagtaatgtataggtttttaaaaaaccatatccttcaatcaaatggtcatcctttagcattaagttgtttggaatagatactccccaaattcacagaataattttccagcctctctttttgctttgacacctttcttattttttttttttttcttcgagatagggtctcactcagtcgctcgggctggagttcaatggcacgatcttggctcactgcaacctctgcctcccgggtttaagcaattcttgtgccttagcctcctgagtagctgggctacaggcgtccgtcaccacactcagctaattttttttaatagagatggggtttcaccatgttggtcaggctggtctcgaactcttgacctcaggtgattcctcggccctagcctcccaaaatgctgggattacaggcgtgagccaccgtgcccgctattgaccccatttgttgatgcttagggatgaaagtggaaactccactgctaaaacagagaatattacttgagtcattcctctgtcatatatgggatgtttgccagcatggaacattcacagaaattataactgtaaaggccctagcaatgatttaatgccgtctcttcacattatagttggggaagctcaaactgtgacagggtcagggacaggtaaaattcacaaagttggtttacagcagaactgtgctacagttatctggattcagatccaagtcccctccaaatgaatcacaaccacttctacctttataattccaggccatgaaagatcactgttttagtctgcgtggtgcagtggaacagatagacctcggtttgaatctcagctctactgtttactagacatgaaatggggaaatctaaaatgagtaagtatacacagaaacacacattacatacatatatgtaatgttcaggatcattacactgaactttagggcttagtactaatgtacaatcaaggttgtgttagtactgagcagtatatcttttattgttgaagtccaataagaacagagcagatatcaacctaatttgtaagtgatgcattttcctaaactaaatgcccaataatggaatgggctagaatattgcaggacagggctgtgaatggaggaaagcagttggaaaatcaatccttttaaaggcacaaaaggatgaatgaaccacattcccaagaacctgctcccacccactgctgttcccacccccgctgtagttggtagcatgttcacaaggaaggagctggctagctttcatgggagccacatcatccatcaaatcacattagtgttgttgatttgaatgttgtttcctttgtaggtctgcttgctttgactttgtaaaattgtttagtcttgccattattatataaggactataatcataaggcatttatatttcattttgtattatgtatttaagcaaaattaagttaaaaattagacagagatatataggatgatttttccttcaagagttattcatttatttccttttggatatgaaaaacgcttatgcagtcctgtatgtggtctctctctctttttatttttatttatttattttttgagatggagtcttgctctgttgcgcaggctggagtgcaggggtgctatctcggctcactgaaacctctgcctcctgggtttaaatgattctcctgcttcagcctcctgagtagcttggattacaggtgccagccaccatgtccggctaatttttttgtatttttagtagagacggggtttcaccatgttggccaggctggtcttgatcctgacctcaagtgatccgcttgcctcagcctcccaaaatgctgggattacaggcatgagccattgtgcctggcctgtggtctctttttaaatgtttgagattttctctgaccatcacatgatggcagccgcaagttgtaaatatattaaatgagataataccaaatggcataagaccactgtgaattcagtgatgttccaaaataacttgtattttattcatcacacaggcatttatataaattaaaaaataatagcacctgaaaacatgaaaataattgtattcaaggttatttactgcagcatgatttttaagagaaaagactggaaacaacccaaatgtccactaatcgagactgtgtgaacccaagatgttatagctgcatcacacagctgagagaaggaataagatctatttctactcactgccagtggtaatctccaggaagcgctgttaagtgaaagagcaaactagagaaaatgtgaatagtggttaccatttacccaagaagtctatgtgtggtgtgtgtgtgtgtgtgtgtgtgtgtgtgtgtgtgtgtgtgtatgtgtgatttctagagggacagaggaaaaaggtgaagacaaggataggagcgagacttctctgggtacatcttttttttttttttttttttttttgagacaaagtctcattttgttacccaggctggagtgcagtcgcttgatctcagcttactgcaacctctgcctccggggttcaagtgactctcttgcctcagcctctcgagttgctgggattacaggtgcccaccaccacgcccggctaatttttgtatttttagtggagactgggtttcaccatgttggccaggctggtctcctgaccttaagtgatccacctaccatggcctcccaaagtgctgggattataggtgtgaactaccatgcctgcctgtctggatctctttttagtacatttgactttgaagccaagttagtattttccataattaagaaaaaaatagaataaaaaaggaacaatttctaaaaaggaagtcaaaagaaacacattaaactaactgtaagttgagttggtagcataaccacacagacagaaattatttcaagtgactttaacacatactgatgtgactgtgcatccctatcgagatagaaataaaggtaaatataaataaaggtaaaaataagcaagatataaataaagttaaaatgaactgcaacaatcctgaatagttttcaataattatatcataaatagtaattttggtattgttattttaaaacagttatatttataatacatatgttaatgtaatcatgtttatgcttatcataacatatggatgcacagctattaggataatgtataaacatgattatgttaatgccattagggaccaagatttcagagaaaaacaaagaaaaatataaaattaaagaagccagtaaaaatgttatcttaaatttaaactggaaacctcagtataaactcataatgtgttttcttttaaaaaattattttcaaattcagtctcctgaatagaactcgcaacaattaccaagccagtagcaacgacaataaacagccctagtgcccagatggtgctctccaaatgccattttccactaaaaggaatgagggctccttggagaattggatgttttcagatacagagcagaacacatacaaaaagttcctggaacatttgtcatactgaaaagcagatacactatgaaagactatagtaattgtatcaaaagaactcaggagccaccatgaagaggcccccagtgtccagaaatggaataatgtgaacattaagaataataaatcttaatttgtcaagatacaaatttaatcatatcgtagatactcatagcagcattatttaaaataatgaaatattagacacaacttaaatattcaaaactagcagtgtgcccttatatatagaaatgtcatttaaaccttgtagaagagaagtttatgatttaggaagatgtttacaatatgctgtaaaacacacacaacaagtcataaaatattatgcatgcagtatattccagtttattttaaatgatctaggtataaatatccataaaaagaaaactgaatgaataaatggtgaaatgtgaatagttgctatatctgtgtggcaggattacaggtggttgtattctagtttctctttatgttccaatcttctacagttagcatgtataattttatatttttttaatacaaaatatgttatttaactagtatttactaaacaaaaaattaaaaattaatatattttataaaaacaaaagcatatgaatagaaaagtacattattttttaggttatagacaatgcttgtacctgtgtttagggatttgatcctccaggtaggaaactacagatctaatttaacttatttaattaattaattaattaattaatttatttatttatttactttgagacagagtctcgctctgtcaccaggctggagtgcagtggtgtgatctcggctcactgcaacctccacctcctgggttcaagtgattctcctgcctcagcctcctgagcagctgggactacaggcatgtgccaccatgcccagctaatgtttgtatttttagtagagacggggtttcaccacgttggccaggatagtctcaatctcttgaccttggaatccacccacctcaccctcccaaagtgctaggattacaggcgggagccactgtgcctggcctaatttaaaaaatttttaagtcaccaaaaagcaaagtgacatgctcaagtccattattgccaagcaaagaaaaaaatgtcaaaagtacaaaatgtggttatgttttaaaaattagattattattattaagataggatctggctctgttgcccagacgggagtgcagtggtgtactcatggctcactgaagccttgacttcttgggctcaaatgatcctttcacctcagcctcctgagtagccgggactataaggcaggcaccaccatgcctggctaattaaaaaaagaattttttttttgtagcaatgaggtctcactatgttgtccaggctgatcttgaatgcctggactcaagtgatcctcctacctcagcctctcaaagtgctggcattacagtcctgaaccaccatacctagccagatttctattactttgacatggtcctggatacttcatctatgtgtgcaaaatttcgtacttatctcttaaatctggagaaaaatggccaaatttggtatagttgaatttatcatggggtgattaataagtgactaaagattgaccttcaaggatctgaagatctgaccagtgtagatttatagtaattatagtaattacatggtacctccaggtattttctatacattgccgtagttagctatgaaaggatgtaaagaataaaggcaattgactattttaaagaaattaacctcagaaggagattcttcacctaaatgtccctgcaaatattattgctttatgctctgagttagctgaaaatgagtttactatgcctggtgtaaacacttgcaccacccacctgtgtcaaagaacttttcactaactgcatcatgactgattgacgtcagtctacttggcaaccaagtgagccacttagaagaaggctccccttatgaggttaatttctttaaaatggtgaattgcccttattccttatgtcttttcataactgattacacaaatgtatagaaaatacctcttgagatacaatacaatctgtaactagtcatcagagaataacacgttattgtaacacagatttagcttggccataaagggcatatttacatacacattgaaaacaactttaataaaatgaaaaacatatatccttggattcttagcaatttaacagcaatgctctcaggggatcaagctactatttattgactccccctgtgtgccttacacgtaattactgaccctcacaacatccctgggagttagtgtcttacaggagacctttgacatttgtgagaggacatcgtgaatattttccaagtcctcaatccaaaagtgtggacatagctgttggttttcctgaattgtatttctttcaagaatcaaatgttgcttgtgaatattctcatgtaagattaaaaaaaatcttttcctgactcttagaactttagttttatctctgctttgagagccactttaataagcaaactaaaatcactctacagaaaggctgtacagcaaatgagtagagaacaaaagctggctaaactgggcagtcagctaagatcactcagtgtctgagaatttgttctagaaaatcaccctccgagaatcatgcagattgtgcttaggcttccttcatatattcatactctcctcgggtgaacataaattggcacatttataaggaaattttattattatatactcaaatatttttaaacatataaatagtttgtcttgttaattctacctcttggaatctatcctaaggaaaataatcataagatatctgcaaagaattatttgaatgttgataataattttatctataacaataaaaatttgcaaggtggcagatatcagtttatgtctctgagctccaaatccacccttgtttatcttgctttgtgtgaatggagctggaccctgtggatctttctcttttgcaaatttgggggatattcaactttgtcaattgagggcactggagagaccctgcaatggaatagaggctccaggtgcacctacaggccatctttccctaccagcagcgatttcagagtaacttcagcctgtccataccctccagcaatggtgggtcacttctatagatgaactctggcccacccgcagcaccaagcaaaggaaggtcactcctgtacaccagcttccaaccactctcatccaccagtgatgatagattgcttttatggatcaatgccagcctttgcactcagtcgtttctttgttcctgcaggctgcctgtggtagttactatctctctgaagaggtctgaatctcagccttggggcaaggagggcttgtcctcatccttagtgcctttactgttcttcttcctcagcctagaaataatagctccttttaaaattcttgatgcctgggcctcttagagtcctcctttatatatcttttagtaggtaatttttggaacattaaattttccctgttcaaataattatcatagtttttgtcttccacttggaccttgaatgatacaaaagttaaaggctcaacaataccagacttgttaaataagtagggagctatccacacactggcataaaattgttttgattatctattattcccttggtgaggtgacccagacccttgtttgaaagcgttttattggctgggtgtggtggttcatgcctgtaatcccagcactttgggaggctgaggtgggcagatcacctgaggtcaggagtttaagaccagcctggccaatgtggtgaaaccccatctctactcaaaagtacaaaaattagctgggtgtggtggcgggtgcctgtaatcccagctactcgggaggctgaggcaggagaatcacttgaacccgggtgtcggaggttgcagggagccgagattgtgccactgcactccagcctgggtgacagagcgagactccatctcaaaaaaaaaaacaaacaaaagaaaaacaacaacaacaacaaaagaaaaaacaaaaatgaaagaaagggttttatttgtcttctctctctctccctgttttttttttttttcttttttttttttttgtctcatctttgctgtaattgctcatttgctagggtcattggacacagagataccaagatgtcttcagaaatcatgaatattccccaagtcctctatcaaaaagtgtggacagagctgtcggttttcctggggtttagacatgttctttcttgcttctgttgtgtagtaaccctagctcctcaaggaaatcgtggtctatgggctctgccaaacagtaattcctttctttgcttgctggctcactggcttgaggaactcaaagtaatcctttggtaatttcagcttccaggtcagtggggacattaatgtgtttcttggtagaaatgtcactctactccaagaaataagatctttaatccagaaaacctgagttttcagggacagaatgcacaaacttttatggtcattcactgggagttctaatgagcaggttcgatcatatttctattctttagttcctcgacccatgcattttagctactgggcggcgaaccatgtatcagctgttagtgctgtgtgtattccatatcatgaaggtaatttcccaggcccacaacgttttcttcccaagctggtgccgtaactgagcctttaccaggctattccatcattttaggtgtttctagggtatagagtaaatgataagaccagtgactcccatgataaatgtgcaccatggtgaacttcctttgctgtaaaatgtcatcttggtcctagtctatatcgtaaggggcaccatactgatagaccaggtactggtgagcccttggatggtggtactggtagaggaactgcaggaagaaaaggtaaatccatactcagaatatgtgttgattctggtaaggacacgttgcttttccctccaagacagatggttccgatagatggttgtgtagctaccctccctgaggaacggtactatgtcaaggtcttggcatcagattccgtggctgacaggttggaaatttagcattgacagtagctgaattatcttttgtaagtgggagctcaaatatgaccatgcatagcaccatagtgattgcagcactagagacactatttatgggctttcctgcacaagaactggggtggctaaagacggcccggctaaaaggcaggatggatcatcctgagcacatggttgttgagagtcttctttgcagtcgggcggtagtgtgagatctgctttgtgtttatttccgtagggttgtccacatacatttttttccccacaccttttctctgagcttcaaatctttttttcttgtcctgtcgaaatggccaagccattcactactgcttagaagccagtgcatacttaaggatctggtcttttcttccatatgaaatgaataactaagtgtgttgctcatagttttccccactgggaggatttccctttacctctcttctttggggccacctcaagtgaggatgaaatgcaacagcagactatctctggctagaggcaataaatcacactagcccaattatgcaccaggcctgagctgtttcctccactactgattgtttgtaggtagcagttgtgggagcttctgtggaacagattcaggtggtacagctgctcaaactcataactcacctgcaatgtgttctgaaaatgtgtggcttaactgcatctaccctaaaagaacaagttggtgagtgatgagatgagtgggaagtagtgaggatgacctggattttccattgaggaagtggccaagtcctgcggacaaattgtacctaggaaaaggtacaaaaacaggagaatggatcatgcgttcagtattggaactgatgactattaagttgctgtgggcatctgaatatagatgttgtgatggttttaaaacatgtctgaaaattctttgacactgtttccatcaagaggtgatgtctttgtctcctccccttgaatctaaatgggcctttgtgacagatctgatgaatagaatgcaggaatgtgatgtccaaggctagtttagaaaagaccatgtttgtttctctggagacacttgctctgggagctattagtgtccttccaccaaagccccccaggaacacccctgcagctaaacaaattggatttattgcttattgtagcaagacagaacattcaccagggggaaccataggttatctcagtaagagggttttagaaagaacctattataagatttgggctttggttgggtgatttgggggaaggtttaaggaatcaggggtggccaggcacggtggctcacgcctgtaatcccagcactttgggaggccgaggcaggtggatcacgagatcaggagatctagaccatcctgactaacacggtgaaaccccgtctctactaaaaattcaaaaaattagccgggcgtggtggcgggtgcctatagtcccagctactcaggaggctgaggcaggagaatggcgtgaacccaggaggcggagcttgcagtgagctgagatcgcgccactgtgctccagcctgggtgacagagcgagactctgtctcaaaaaaaaaaaaaagaaaaaaaaaaaggaatcaggggtttggtctagattgaatgctctcagaaaatgggagtaattctagggttgtatattttataggtggcatagtgaccttgttttgtctgtccttacacaaatgatgaagtaggctgattttgtttcattttatcttggtcgcagagtaactttgtctgaggttggtgttctataagattgtatatgtccaacaagagaatgacatggcttagctgtgaatgtcagatcagttctggatatgagaggctgatattttctttttgagctttcagttgtcatgtaaggagtgtggctaccatgaggccactgcatagagtgattgtatacctatatataagagagatggtttggagttcaagcccccagctagtcaagtcttcccagcccaggagacagatgttcgaatgaaggagacttaggtaatttcagccccagtcactgtctgaccacaactgcatgagagaccctgagggagaactgctttgctgaacccagtcaacctccagatttgtaagtaaaataaatggttatcattgattgaagtcactgttctagggtggtttttcctacagtaatgtcattgatacaggtgtctggcaggcagttggctctagaggtctggagctaaggagaaagatctggcttggagatgtggatcaggaagtccttttacaaggagaaaagtgcttgaagtcatttgagtggatgacatcacctgaaagataatatacattgagaaagaaaaaaataaaaagccaacaatagcacctttagtaacaacactgaagagagcaggaagaaataaagaaacatttgcaaggagacagagaaggagtgaataaggtgatcaaatggcatccatccaagagatgatgtccaggaagccaagaatgagagtatttcagaaagaagagtgttgtccacagagttaaatgctatggagagagatggagtaagacaagattgattagcaccaatgagctttcattgttgacaaatgcagtttgagggaaactgggggctagggagtgatggggcagagaccagaatgcagtggggtaaggaggggtaagaagatgagaagaatgccaaatctgtgctgtttgccacatcatgggccctctctccatactatttatgtgtgtataatttttttctacaatttaataatgcattaaaccatcacatcacatcacatcacaaacccaacaattccacaatagcatgggtagatcataccctggtgtatttttaatgttatactttaaccggtagttttgagtcataaatgtactactatgttgttggttttttttttttttttgggtctgtcattatagtaataactttaaatctcttattgtttatttctcttgcaattaaaatagttcatcatttaaaatagtacccagtgttcagtgtccattggtgccttgtaattacttcagaaaaacagtctcagtttaaaagttataaactcttaatgcctctctgcaggaggaatagcttccttctgccagagcggtctggggagcattattctagtcataccctgctaattcattggcttgattgtcaggggtcctgatctagttcaccctcctgggaggctggtgtgggaccctgcttatcccagtgggggtcaaggcctccttgacaacagtgaatgggttgctaggaggctgcggaaagaaatttctctagttccatccacaagtagatcccactgcagtggcctcatttggctcctctaatcctctctttcccaccttctttcagggcaagtctcaccctattttcttcattacttgcttgtggtttccttgccggagatgcttggaggcaagcattatgacaaggatgggcgcgggtgggagtaaggcctttaaacgaagagctacatttcaaagaacttcaaatgtgtatttcaaatgtcacttccaaatgaggttgtacacacagacagaaacgcaattaacagatttggaagaggccacgtagcatgcatttgaaactcctgttgcattccttggctattcttgtctgtggcatctttttaacaaatcctgtagttaccttgtaaataccatcatagaatatattgtatttaaaaaacattctttactcagatatgaaagttgaaaaggtactattatttttaaaaatctgtattggattttttttttttcatattttaggatgccagaagcctcaaaaatggaaaaccccctgtgcttcacatctgaaaatctctgctgggggcagcaactttgagcctgtggggaaggaactgtccacgtggagtggtctggtgaatgcttaaggagctgcagaagggaaggtagtgaggagacagttaaatattgagcacgttttggtgcctagcattgtactggcctttcacatgctatgtttaatcacgcaggattgtatggaatgggattgtacagaatgaggcctgggtttgctaaatcctgggggagattgtctaagctgtcacttgaagggaaaactgtagcatgtgggacttaaaaacagcttgggatggagtttgaggtagggcgagagggaaaaagatcttggcagatacattctgaacaaatacttgtgtcatcctcaactgtatagtttttatgacttttcctgtgttcatctggttggcagatgaatgcaaaatgccttttagcttcatggaaggcacacatgaatcatggctatgtgataaacagaagaagccacgtttcggagggtttctggtgtgtgtacgtgtgcacttgcatgtgtgtgggcacacccttgtgccaaatggaccaccagtttaaatcgattttcaacagggcagatttcatatgcttctttagtgtggcccaagtcaatctatttttagaaggggaaagtagagcatgttctgaaagttcttttcttctgccatcagggattgtagtactttttatttatagtaatttcaggtctctaaatacttcaagcaaaattaatgaggcaaacaaaaaaaattaggtaccagataattggatcatgtgttattttatagagagctttatttatcttgcctttggaaagtataatttgtatttttcaaaattatgattagatctaattctttttcaagatttacttaaaataaatatttctgcctaggcacaagactgtgtatagcacaactggccttgtattattgacttgatgatgcaaagaaaaatatataagaatcagttttttttaaatgtgttaatatttatcataatggaaatagtcttactaattagcaataactagaaaaatgtctactatttattgagccactactatatgccatattctttacctatgttcattttctcttctatattcaaaataatcctataaggtgtgctttatgatcaccatttgttccaatagggtctcaaggacgttaggtaattattcctatgacattgagcctatgaatggcagagctgggagtttgaacctaagtctgatgactctgaagcttatagtctttctataagcttcttcagtctgaagctgcccctcaaagtcatggcaataactgagaatagcattcagttttacagctaggaaggtagttgtagttgtgtttattattcaatactgtccatattcaaagaaccattcattgagcttctattttactccagtcacggtgataaataatgcagaatctagagatcaaagataaaatggccttgccctcaaggaacccatgagctagttgggaaaactaataggaatattaatgattataatgcagaatgttaggtgcaatgagagaggtaacaaggtactactggggcctgacaaaggccaccgtttctgtgtgtgtgtgtgtttatgtgtgtttgggaaaaggcaaaagacacttgagataaagggaacaacatagacaaaatcaaaggcttgagagcatataacttatatgagacatagcaaattgtttgctttaactagaaaatagtggttatgtgtggcagactatgagaaatgagaatgtaagtccttgagaatgataactttagaaattctacatttgggatgatcataaccttttaaaattgtctcaatatgatagatattttccttctgttttggggtatctgtctttttattttttatttttttgaggtggagtctcactctgtcacctaggctggagtgcaatggcgtgatcttggctcactgcaaccttcacctcctgggttcaagcaattctcctgcctcagcctcctgagtagctgggattacaggcgcctgccaccatgcctggctattttttgtatttttaatagagatggggtttctccatcttggccaggctggtctcgaactcctgacctcagatgatccacctgcctcagcctcccaaagtgctgagattacaggcatgagctaccacgcctggcctggggtgtccatcttttaaagacacactgtaagaatcataatattttcccaaagaagaaatgtaattagtacacaattacatgttaaaactaggtgttattggtaattaaaatttaaaaaaattaacccaaccaaataataaaactaatgaaaatatttaatattggtaagaacaagatgcgataagcatatttgtgttttgctgattggtctataaagtggttcaaaacttttgtaaactatatataagctattttaaatgtttatgccctttgattcaatagcactaggtttggtactttataataggaaagttattagaaatatttactgcagggtttcttcaatgatgagttgtaagaatcagcctaagtagctatggtacatcactttgatgcaacttaatgtgtcattaaaaatcatgtttatgaataacattccagatgcatttaatacaattctagctgaaaaaaagatactgaaacattttgtgtttatatatgtctgcatatgtatctatatatatccctctccctgtcaatctataaattaaaaactatacattaaaaactgcaaattaaaactatatactaaagaaagaaactggaaagaaatccacagaatgttaataatcatggtcattgtgttgagtggtaggactatgggtaattttttctttctatttttatacatttttcactttttttttttttttcaatttgaggcagagtctcactctgtcacccaggctggagtgcagtggaacgatcttggcttactgcagcctctgcctccgggttcaatcaattattctacctcagcctccagagtagctggaattacaggtgcacaccatcacgcccggctaatttttgtatttttggtagagacagggtttcactatgttggtcaggctagtctcaaagtcctcccaaagtgctgggcctccaaaagtgctgggatttggcctcccaaaatgctgggattacaggtgtgagcaccacacccggcccatttttcacatttttaatgatgtttttaactttaaaagtaaaaatttgtaatttaaaatttgtttaacttttacaaataaaaattacaaatgcaaattaaaattgctatatatttttgttactggacaagaaaagatgcattatagagtctcgttttattttgttttctgataaatctattgctggggagcatgtgcgtaattcgttttaaaaattctcagtgttaactagatttcttttgggatagctctgctgaactggaatgagatcttcttccccagagccacttgctagtttgattttctagaaagagagaaattatagaaagctacaatctacaaattgctatgtactacagtctactaaatagtataatactttattttgcaaactatatctctcagagtacaaggctccacagctagtcttgcaccaaatatatgaggttcttgaatagtcattttctcaaagttctcatctctttacaaagcaagttgaggggggaagcagagagagcactctggtgcttccaaaagcatcagccatccacactctgcctattgaaaacaccaaatctgagcatgtgtgtcattgtccaggaataaacaatcacaaaaaggcatcaatgaggcctataaaaacaagagcgcatgcaagaagatgggattgttatgaaacaggagcacaaggctactaaaagagggcaagcctaaaggaaaagtcaccagggtgagatggaaatagatataggaagaatagtgaacggtggcaaggaagtaaaggaatacaaaagtaataaaatatccattgcattagtccgtccttgcattgctgtaaagaaatacctgagactggataatttataaagaaaagggtttatttggtttatggttctgcaggctgtatgagaagcatggtgccagcatctgctcctggtgaggcctcaggaagcttctattcatggaggaaggtgaagggggagctagcatatcacatggtgagagatggagtgagagagagagagaaagagagagaggagatgccagtcttttaaataaccagatcttatgtgaactcagagtaagaactcacttatcatgaggacagcatcaagacattcatgaggaatctgaccccatgacccaaacacctcccactaggcccacctccaacatgggcagtcacatttcaacataagacttggagaggacagaacatccaaaccatatcacccacattgagggagcaaggagcagactccatactgcagaacacacatgggaaacaaacttgagaagtttccccagggcatagggtaagaggacgaggggctggaaaaagaaaggtaatggatatagaggacagagaatggagttcgaagatacatctaagaactttacatattcctaaggaacccacaaagataaaacaaacagagcaagtatgaaagatgtaatagaagcaaatgaccctgcattgaaaatgatcaaagtatgcagattggaaaggctcacaaattccaataaaaagaattgaaaacaaaaaaaaatgctgcaataacattctttaaactatattaattgtaaggtttttacaaaaataagtactcaggcagtagtaaaaagtttgcgaataaagaaaccaaaattaaactctaacttttcttatgtaataccaaattccagaacttggaaacatatctgcatgctttaccagggaccagattatgaggcagttatttaagattagaaaagttctctttcattggtaaaggcaacagaaagatatattttagaggtagaagctctctaacatagacactattctgccaaaaaaaaaaaataagataaatgtaacaaaataaaatgagcttcaaggtgtattttggtcactgagagatgattcaaaagaagactttgaacaatgagaatgttaacatttaaaagaataggtggaatttttccttactcagtttgttcaataaaatcatgggtccactgtaacctgatatatcttgttgcttaaagggaaagcttggccctaccttttctgctttcttctgtgttcatggtgtagaaaatgtatttttgttaaccaattatttacttcacacttgaggtagactttgttgccatgttggatggctattttgttaggtcaaacagttttctgccacatgcctatgtgattttaaataatgtagccctcaccctgagcttctgctatagggaccacatgctttgtggtaaccaggtgctgccaaaattggatgatagcaggctcctgacccatgcctgtcaagtcataggtggttaaggtcatgggagttggagtcagactgtctggttccaaatccaaggtctaccagttgattttgaccttaattttcttattctgtaaaatgagtttattgattgttcccactcagttcgtttgaggtgaggattaaatgagttaatacctgtaactttttgactggcacaagacacaatcctattacatgttctgaaaaaaaattctctacatgaaccaaaggaatgaattctatttcctccactgctactacaactcaacacttctaatcaccaaatgtgtggaggtttttctacatcagtttgtcagacacctactatgtgtcctataattcagttcagttctgacaccatctacatggaaacaacatccgatcccatggactaaaagctcagtctcataagactgtctataatggctcaagtgggttcttcttgcctgctgcacagaaaaaccaatacatcaaggcagtggtgttgcagtagagaaagcatttgataatcacaaggccagccaagtggaagcatgggagataattcttaaatctgcctccccaagagctcaggggctagggtttttaaggataatttggcagacaggggactagggaacgagtgctgctgatgagttgtggatgaaatcataggagtatccaaactgtcttcgcatgctgagtcagtttctgggtggaagtttctgcgtgggagtcaatttcttggcatgagtcacaggtccgggtggagtcagttagttgccagaatgcgaaagtttaaaaatatctcagagaccaatcttagattttgacaatagtgattttatctataggagcaagaggggaagttaaaaatcttgtgacctctggctacatgattcttgagcagtaactattatagaaaggtaagctagggaacaatgtctggttatcatttaattacacctacatcttagcagaatttaagttcttctcataagcccaaccttgtggactttcattagtcttacaaaggcagtttcagtcccccaccaaggagggcattagtttcaggtagggactgttatcatctttgttttaaagttaaaaaaggcagttagcttgtgatgttagaagaaagatgtcagatttctctcactgtcataatttttgcaaaggtggtttcatggccccacttgaaatgagaatgggaagtccaggttttcacctgtgctttagactgggtggagataaattaaaggttcacaggacctcctcctcagatttgaccatttgctagaatggttcacggaactcagaaaaacagtttacttatttgattaccagtttactttaaaaggaaattacaactcaggaagagccagatggaagagaggcatagggcaaggtatgtgggaaggagcatgaagcttccgtgcattcttgggctcatcaccctctcagcacctccatgtgttcagcaacctggaagctcttcgaaaaatgttcttaagccaggtgtggtggctcacacctgtaatccccgcacattgggaggctgaggtgggtggatcatctgaggtcagcagtttaagaccagcctggccaatgtggcgaaaccccgtctttactaaaaagagattagccaggtgtggtggcacatgcctgtaatcctagctacttgggagactgaggcaggagaattgcttgaactcaggaggcagaggttgcagtaagccaagattgtgtcactgtactctggcctaggtgacagagcaggactccgtctccaaaaaaaaaaaaagaaagaaaagaaaaagaaaaatgttccttcagatttttatgagggcttcattgcatatacatgcccctccctggaggttggtctggaggttgggctgaaagttccaactctaaccacatggttgatttccatggcaacagccctgcttatcattagggacttcccaaaagtcacctcattaacacaaactctggtgtgactgaataacaaaagatgctcctgttacctttattgctcttagaaaattccaagggctttaggggctttgtgccaaaaacaaacactatatatatcttattataaatcacactatctcacattattattatttaaaatgataagtcagtcaagctctcttttcttgagaatttgatttgggaaacttcgagaatgaggcaaggagcagtgggaataggagtttaaagtaagcatagaaagcatagaaagaagctagggaatagattaaggttgcaaggagggataacaaatggagattaggaaatagtggagactgtgattaagcagagcctgtcattaggcatttctgatataaacccagatgctgtcatatcacctcactgaatgcttgccctgaaacacttgttttagtgcagataaattcatcacctaaggatggcttatcctttctatggccattgaacttaagagctccactaaataggataactccctttatgctgggaaatctaccaaaattacctgtgtcagaagggtaagaaaagagaatccaggatccagaatgggattgaagtgatctcccattctttttgtgatatttagactgccttctgcctctccaatcgacagaataaagaccaaacttctacccgggtgggtagggcttatcctgaggatggagactttctaagtatagatggtcaagaaactggtgcacatttaagttagacgcatctctaaattgtctgggcttagactattctaagaatgaataattatgaaaattgaggcagctcagagactcattttctaagatttcaatatatgattagcaaagtgctatagaaaaaaataaaatggcacagtttggcagttggcatcttgtatctttctgtcccaggtctttcttgtgcttgtaattctttcattgataaagaactcagctatctatccaggcgtgatggctcatgcctgttatctcagcactttgggaggctgaggcgggaggatcacttgaggtcaggagttcgagaccagcctggccaccatggtgaaacccacatggtgaaacatctgtactaaaaatacaaaagttagctgggtgtggtggtgggagcctgcagtctgagctactcaggaggctgaggcaggagaattcctcgaacctgggacttggaggttgcagagagccaagattgcgccactgcactccagcctgggtgacagagcaagactccatctcaaaaaaaaaaaaaaaaaggattcagcaatgtgtggttcttttgaatctatggtatgtattagcacatcacagcagagcagaggttctcaacaattgattttattccccaggggacatttggcaatgtctggagacaattttggaacttagaggctgatgctattttggaacttagaggcttagatgctattggtgttgtgggcagatgacaagagagattgcaaacgttctccaattcagaaggcagcctccacaaaaagaattattcagtccaaagtgttaatagtgctgttattgagaaaccatgccctagagaagcagcctagaactttgagtttttccttttttttttttcaatcaactaatgagaataaatgtggaggagacgggcaaaaatgtcagcagccccgtatggttttcaaaatcatttcagatatttgctattcaccagtgtcagccaatgtgtttatttttgaaaggtcagaaatttcatagggccagattactaaaatggttattattatttttttgttttcaagagcttatgttagttatctagtatagagaagtctaccatagagatccctttgttctgagtactggactttttcacttaccaaaactctcctactctatacgttcttcaccgtgataatccaagaagtctgaatcctccccatggctctcccctgtttccatccccagtcggtgggtttcccacaggtctccagtgtgctttggaagtaggaactcctaacagattcacagtttgaacatggtagtcctctgagctgttcagtattttaaatctctctgcagttagttataatcattcaactcttttagtcattcttctaatgtcagtatagataactaaaagattgtaatattagaagacctatttcccagagaccacaaagacaatctcatggaagtcccactgtagtaaatagagtctattttctacccagcatctggtagagtaattcagacatgtgttttgacagtttgcctgaaagtaacttgacaaataattttactaaagaatcctagaaagtcaatggcaacattttgttcattctaagttgttcaagccacgtccttagatgtggttgattcaaatttcttcagaactggaaaagcacaagagaattagtattccagtaataaggaatcatggattgtggcagtctttttaaaacataaactagtttagcacataagtggtggcctagtacattttaaagtggagtccaagggaagtttcttgaattgctgtagttcttatggtgttctgctgaagccgtgtagatcttatggtgttctgctgaagccgtgtagatattgatcatgctgcctcccaccaccacccccttcattccagatctgctcaaagacaacttagaaggtcctatcctggtctcctgtctgaaacatatactttctctcctcccgcccccagcctgcccatactattccaatccttctctacctattattcctttgttttgttttcaatataaaaatcttatctatttctttatacgttaatcatctatcactccccacacactacaatgtgtgcattcattccctgagtaactgaaacctagaggcccgggagtcatttttgaaacttcctttccttggctttctcctctaactgctcttccaattcatcggctggatttgactattctaattccaaatctgtctggaactcgtgtacctctcgcagtgtccactgctgttgttctggtctggggcacaatcgacactcatgctcaccgaactgcagcagcccccttcctgctgcttattttgaccacacctctttttgaacctattctgtacaaaggagctggaaagagtcagtaaaaatacagagcatagtgttcattgccttgcttggacaggacctgccatatgtgtcttctctatagtattggctgaatgcataaacagcgagaaataaatgtgtagagagtaaattgatagaaagctgccctcagtcatctcccatggagagggctagtgatgactggcgaaggtcacagagctactatgtgttagattttggactaaaatccagtttttctgagaacggtcaagagtttatttatagaaaacatgctgctttatctcttaattccttctcactccctgcaaattagtggcattttagtttacttaaatgcacaattatttttaattttgattgaaaaattaatactcatttacttctgaaaactatttctttaccgaagagcatagagaaataagggagtaatttatcaacctaccataggtggaatttttactttcatctttatactttcttcttcattattgttttttttaaaaaacgtaagtatgcatttatttttataatcaggaaatatgtgaagttatataaatgtgtaatgaatttcattactgggaactaactgctggtgatattttacacttgattttagccaaaaggccgagaagcgatgctggtgatattctaatgtactataacttattctaatatttcatgggatttatttgcaattagtgtgatataaatttccataatgtatggaaagatatattagaagatgctaaccatgggcttaagaaagtagatttcataatttgaaacacggcccacacaattaataaatataagacatttggcactctacttctaatctcttgattttttttatagcaactgtctttaagaaccccagcatattcatggattttttagaaacctaattatttcctagaaaaatcctttgaaaaaggaaaattatatttgacagttttctaaagattttctgtgcagaagttgtatctggatatacatataaagccctgaagtaatctatacattttatcgctggtcttcagatatgttggcagagtcgctcgtgaaatatatgcttgaaattaatgtaattactctgacatttgttattttaataagcattcttagctaatacatagaggaatacattaaaggaactctaacaccaaaattatcctttcttaattaaataagaaggactgcaattatttaaaaagtgtatgtcaaatctaagttgccttcaaatgtaatttaattttctgttacttacattttaaaatggccatagcttttttcgttgttcatctttcttaattctttaggcactacttaccccccaactccagcaaccaaaattaatcctaatttgcatcacaataatttaaaatagatcaaagaaccaatttcatagcctaattcaaaagcatcatgcgaccaatatgtagtattaataaaacatatttctggttttgccaatccaattttttttttaattaagtgcttaacacagtgcccagcacagaaaaagcacttgatacatgtttggtaatgtctttgtgactgtcatttttactaatgttgtatattggtactactaaagtctaatgggatgcttgtattatggtgtgataatatagttaggatgaccacttgtcatggctggcctgtgagaatcctgtttaatatctattgttccagttttctccaacttaacattttagcactcaaaagtatgtgatgtggaggataaattttatggtcgccaatcctttattgtaaagaatcgtgatgcaaaggctccagtgtagtcatcactcatctcttgatttaggcatctaagctatccaggcatcatcatgggggtgagcagcctgaatgacagtaagctttccaagtatggggacatgcacttaagataggtatagttattccagtgccaatctcctcttacctgctgtatgtcaagaatcaggcaacatttaggaaatgaaaccacaagtctttgtctctttttttaccctttatctcaaaatggtttttacttgggatttgtttttttgttttttgttttttgtttttttttttgagacggagtgccgctctgtcgcccaggctggagtgcagtggcgcgacctcggctcactgcaagctctgcctcccaggttcacaccattctcctgcctcacctcccgggtagctgggactacaggcgcccgccactacgcctggctaattttttgtatttttagtagagacagggtttcactgtgttagccaggatgatctcaatctcctgacctcatgatccacccgcctcggcctcccaaagtgctgggattacaggtgtgagccacggtgcctggcctttagttgagatttgattatgaatgaaaatgtaaagaaatttgctagatgtgtccatcttttcatgtggcagacaatatggactagatatatggtggtcaaaattatgtttgtgggtatagcctaatagcctaaaccaatgacacttatgtggcagttttatttatttattttttctttttaagacagggcctcactctgttgcccagtctggaatgcagtggtgcaatctcagctcactgaaacctccgcctcctgggttcaaatgatcctcctgcctaaacctcctgagtagctgagattacaggcatgagccaccatgcccaactaatttttgtatttttagtagagatggtgctttaccatgttggctaggcttgttttaactcctgacctcaagtgatccacctgccttggcctcccaaaatgctgggatagcaggcgtgagccactacgcccagcctcaccctggactttatgacaatgccaaatatatgcactgtgtcaaaaacagtcctcttcactgtcctccagtagaaaaagctcaataatgggtctacaaactcctggatttagtccaggctatgtaatttgtggaacttagtgccaaaagtagggtcctttgttcaaaaattattaagaatttccagatggcaacagtggaacagtcaatgaagcacaggatccttctgtccccaaggtcctgaacaactgcagaaaccttgtgcccgtgcattcatccctccttcttggatcctttacctgttgatctccttcgttttctttccagacaacaattatggacaacttattattaatatatgtgagccactgtgttcactatcggaaataaaaatatgcttataaggtagtcccaaatctttttttttttttttttttttttttgagagacagtctcgctctattgcccaggctggagtgcagtggtgcgatctcggctcactgcactctccacctcccgggttcaagtgattctcctcccgcagcctcctgagtagctaggattacaggcgtgagccaccactcccggctaattttttgtatttttagtagagacagggtttcatgatagtggccaggctggtttcgaactcctgacctcatgatccgcctgccttggcctcccaaggtgctgggattacaggagtgagccactgtgcctggccccagatcttagattttggtgattaaggacttcacgaagtagatgaaataacacccagaatttggctggtttattttctccttaagatgctcagctgtgattttctgtatattagtctcaagctgcaaattctctattccaggatcttatgatctgtgtcctaactacatattatagggccccagtggtccctatgcctctggttctattgtcatcacacacttcctgtttcattcctatagacagatttattcatgactagggaacagattatgctagtaaaggtgttggttaacatgagtttaaggcaagaacttaaacgtaaatatctctagggattggacaggcaatatgccttaaatagtaaagctatcaggtagggattgactgcatgcctgcagaggaaactgctgcctatttagccacagaagattattgccatgtaaaaatgtgagtatggtttgtcacatatttttaaagaaaagtcagaaatccaaaaatttgtatgaaatttttaaacattttatattgtcaattcaatttttaaaaagactcaatataggcagagaaaaataactacagcccaaggttaagccaagaagtattgtttttctactttttcttcgtagtcagatttgttcagatataattcagatgtaataaataaaccctttaagttctatgagttttaacaaacacctacattagtgtgacaatcactgtagacaagatatagaataattctctcgtctcccctccaaaattctctcaagcctctttgtggttaattctcctagctcctgacaatcgctaataaatttcctgtctatagttttgccttttcaagagtgtcaaataaatggaacactactgtatgtagccttttgagacaggcttctttcactgagcacaaataatttgacttattcacgttgttatatgtatttagattgtttctatctaattttcaaaggttttttccttcctttcttctcctttcctccctccttccttcctttctttttttcttcttcctccttttattctgccttttttctctccttccaactttcccgcttttttagatatcacatgtacagaagtagattaatcttgatgtttatttcataacatactctcatttgggcccatgcatggcttgtatttcaatagctctattgagataaaactcatatacattcacatggagaaacagccctgtggagggaaagaaattgatatgcagtaaactacacatactcatttacaacttgaaaagtttgccatatgtatacacaatgaaaccatcaacactttcaaggtaataacatatctcagtttccttgtgtctttatgttattcttccctccttccatctgatctgctttgtgtcactgcattttctagaattttatgtaaattaaatcatatagcatgtgctcttttttttgtctggcttctttcatgcagcacaattattttgccattcatatcagtttttgtgtgtatcaatagttcattctgtattattacaaattagcattcaattacatgaatacattgcaatttattcatttgtgaatggacattgcattatttccagttttggctgtgacaaagattcatgtggaagtctgtatagggacatatgctttcatttctcttgggtaaatgtcttagagtagaatgcctaagtcatatggtagatgtatgtttaacttttaaagaaattgccaaattgttgtccaaagtgtgtaccattttacattcctggcagcagtgtatgagagttctagttcttcaccatcccccttccaacacttgctatagtcagtcttgcaattttagccattttaataaatgtgtagtgatatctcactgttgttttaatttgcatttccctagtgtctagttatgttgtgtctttacttttgtttatttgctatcattatcttccttggtcaaatatctgtttaataattgatacattttttattggactgtttgttttcttattagtaactttggagagtgctatatatattctggatacaaatcctttaacaaatgtatgatttgcaaatattttctcccagtctgtgattgtcttttcattctcctagcagtcttttgaagagcagatgctcttaattttataaagttcactttatgtttttttttattttgtggattggacatttggtgttatatctaaaaaaaaatctgcctaacccatagccttatgtgttttcttctagaagttttatagttttaggttttacatttgggtctatggtccattttgagttaatttttgtatatggtataagatgcagattgaagatttttttttaatatgtggaaaactgattgttccagcactatttattgaaaagactaatttctccattaaattgtctttgtacctttgttgtgaatcatttgcctatatatgtgtgagtctatttctgaattctcttttctgtttcagtgattcatctatgttgatgccaatgctacactgtcctgataactgtagttaataaagtcttaaagttaggtagtaaaagtctgctattttcttccttttcaaggttgcattttcctattccaagtaatttgcattaatcaaaaagtacatggaaaatgtgtattataacaaaaggtatggaattttaaaattttcaaaattcttttgcatcaaagtaaatgtgtactaacttgttataatatgtgtgaacaggagctagtttgaggcactaaaaaggataaatcatcaatttaaaaacagcccctatcagagcaacatgaattctgataaaattgaagcaagaacaaatatcaaatttatcgtgaagcgtgggtgaaaaaagggtgaaatcattgatgctttatgaaaaatttatggggaaaatgtcacattatcaaacagataactcattttaagaacagatgatatgatgttgaagtcgaagcccacagcagcagaccatccacattaattgataggaaaaaaattcatcttgtttgtgtcttaattgaagagcactgatgattaacagcacaagtaatagccacaaccatatacacctcaactggctcagcttacacaattctgactgaaaaattaaaattggccaaagtttccactctatgggtgccaaaaccattgtgcccagatcagctgcaggcaagagtagagcttttgacggaaattttaaacaagtgggatcaaggtccagaaagatttcttaaaagaacattaataggagatgaaacatggattatcagtatgaccctgaagccaaagcacaatcaaaacaatggctaccaagaggtggaagtggcccagtcaaaataagagcagaccagtcaagagcaaagatcatggcaacagttttttggatgttcaaggcacttttcttgactttctggagggtcaaagaacaataatatctctcattatgggagtgttttgagaaagtcaaagcgttagcagaaaaacgtctggcaaagcctcaccacagagtccttctccaccatgacaatgttcctgttcattgtcacgaaacaagctctcacgaaataaagctctaattttgcaagaatttcaatgggaaatcattaggcagccaccttacagtcttgatttggtttcttctgactttttgttttctaatcttaaaataatctttaaggggcacccatttttccttagttaataatgtaaaaaagactgcattgacataattcaattcccagggtcttcatttcttaaggaatggactatttggccggtatcattgcttacaaaagtgtcttaaacttgatggagcttatattgagaaataaagtttatatttttcattttaatcttttaattatatttttccacaaaatttttgaagtcctctcacatatataaatttttggaatcagcttatcaagtcatgtacatttactgctatatcacactctgttttgtgaatattccaaaattatagtctatgatttatattgttgtgactattgcataatttacatatcaatgtactgatgatcatattttgcaatatttttgttattgttattctattatgaacagtgctactaatataaatagtatttgccacctcatacacaggtgcaagtttattgtaatagtcttagtattaaattttctgagtcatagtttagcaaaagctcaacttttcacaggatattgctggattgttctccaaagtagctaagttatactcctattagccgtatatgagagattctaatcatcttcattcttcaacatttactattttcagacttactaattttgccagaaaaaatacatgacaattcatacccgtacctgtagtggtcttgatttccatttactcagaagacattggacttttcttcttatgtttatgggctatattttcccttcttttatgatattactgttcatgtttttgctcatcttattgggttatgggccattttattttatttttattttttatttatttatttttttttgagatggagtctcgccccgtcctgcagactggagtgcagtggcactatctcgactcactgcaacctccaatgggccattttatatcctaacatatgaagtatctgttcaaatcttttaccatttttttcctgtaggtgtgcttgtccttttcttgttataataaaacagttctttatttttgatactaatcttttagaaagtgttctgttgggctgggcatggtggttcatgcctgtaatcccactctgggaggctgaggtgggtggattacctgaggtcaggagttcgagaccaacctggccaacatggtgaaactccatctctactgaaaatacaaaaattagcccggtgtggtggcgggtgcctgtaatcccagctactcgggaggctgaggcaggaaaattgcttgaacccaggaggtggaggttgcagtgagctgagagcatgccactgcactctagcctgggtgacagagtgagactccatctcaaaaaaaaaaaaaaaaaagagagagaaaagaaaatgctctgtcagtggcaaatatctcttactttttttttagttttctttgaaacctcttttaatgaatagaaatttttttattttaatgtagtttaattcatctatttttcttttttaattgtcttcagtttctttagtcttgttttcataatcttctggatatgagtcttgcaaaacatcttttgttaattttctcatggtttttgttataatagtatttagagttattttatatatttatggttaatataaatcaaattgcatgttgttcttgctctaaattacagattcaataatttgcaacaaaaccttatctctttgtaagtccttaagttaattaagtactctggatatcttcacatataaatacttgtatcagctgtcttctctcttactactccaattaaaatccagtatctagaatagggaaaaaccaggtgaacatcacccttacagagatttattttaagacataatttagggtgtgctccatactgccttggctatgtactagtctatatattctagaagggtcatatatgtgcacaaattgatttgtgtagccaaaagctgctccagtataaatgtgccaccaggatccatttcaaaacattgcttcctcttgccaaggttagtgcagctatgcttgctatcactcaagtaaccagagaatgccagcgtccgtactctcaaaaagacagccttttctgcaccattacaattggtgtcttttgtccctttcttttcactgatggaaatcttttttatcattccaatcaaagatcactaccttcctaggagaagtttcaatagaaagaaaaaaatgttatacttcctcagaaaaatagcactttcttcatatagcaagttttactttcagaaaagttgagaaaataaatactatgcccccaggtttcccgttattggagattgattgctatgttgaatgtgctatagctttgctgcttaaacccaaacgccaagtgcaggagtatcttctttactaacgcatttaatttaccaagcacacttagtggctggtatttcttacctttctaagggtgcactcacttacactgccctcaatatatgtaattaggataaaaccatagaatggaaggcattaaaaatgaggcaggaaagcacaggcagagtgggatgaagccagctttgctctgaataggacttatatgatcagtttagttttattccaaacatgaaccccaaattcaacccctttgacctgagtactccgtcccttaaatggcaaactaaacattcgtgaaaatttaatggtgaggaaatgagtaccttcttaagtttcagatggtgaaatggcaccaggggagcactttcagtggcaggcagaagtgtgtggatgtgctagatcaaacctgaaatatttgttccttcatcctgcagtccctctccaaactagccagccactgagaccttctgacaggacacccccaggatgtcacccaaaaaaggtatttacaaaatcaagactgtctgtaggacactatgtctttctgagaggtataaaggtatttgaaaactttggaaagtttgttttacaatttttgttccctcttttggggctttccctttttcatttttttctgtgggtagtttccctttgtttcctgagaaattgagaagggtttaatatctctccaccttcttctcttttatggatgaatgatttcaccaactggtaagtgctaaaactgacctcgctttcactcagaaagacaatggaggaaaggaaaatgcactgagatttcagcatagcaactcaaatgcgggctttattccacagcagtgacctattgtcagattggtgtgtgagacagtttttgaaaggggatgtgttctgcttccgtttatgagttaagcaaagttctaaattaagttgagaagaggaagcaggtaaagtcagggatagcagagaaaggagacatcaaaccctattgttgtaggatatttatgtgaaggaatgagcaacgtgataaaacacatttttgcttgctgtgacttgccatagggtgcattttcagtactgtgtggataatgtgtggcatgttcattcatcagtcattctgtgacatttatgtagcttacacttggatctattttcaacaacatttcagttccctaaagacaaactggcagaattttcaaataggaaaaacctggacacacacatttgcttttctgtatagactgtctagtccagataatcttgctatcagtcattttgttagcttactcatttaatcttagaatggaaagtggaaacagagacctcatttagagataatctagtaaagccatccagcttcaggctcatatcttgggaatctgagcagtaccctatttaatatgctcattttattaactttaaacacctggagaacatcattattgagaaggtcattgcttttgaaaaaacaaaaacaaaacaaccacttcttatgaggctctacacatctttccaaagaagctattggaaatggcccaaactttcatattaactcttaacagggtggcgtggtttttcattagtaagaacaggattcaaatcttatggaagatggtagatttcaacaccttagcatttttctcaaccctgggatcttcaagttcctcaggctatttaggtagttatagtgctggcaaactttttaagtgcccagtagtttttacaaaaacttgtaataaatctgctcaggctatcttaattgccaaccatctcattaagcaagtcaaattagaatggattattcctgctgtttattagtgctgcatattatttatcatttattaaccttattgtgctcacatagcaggtattttaaagtttaacagctttattttaattatgaatgtaatatatgctgttgcagaaaatatgtaaactttagagaaaatgtactaaatgatgcactgatgaaaatacagaatcccaccacaaaaatattattatcaacatttgggtattctcttccaaactttttatatgagagttatgtttggtttatacataataaaatgggtaaaaatcaataaatagaaagcaaatgtttttaaggcagtacttgggcttcataagaatggaaaaaaatgatagacttgcctggtgtggtttgcataatgtcacagaatcataacaatagctccattattgagtgtctattatgtgccaggttctgtacaatgttcagtgatgcgtcactgtgatgactagaggtaaaggaaagataagtgatgccttactatgatgacttccaacaagctatgaagggacagaacaagcctttttttttaacttttattttaggcttgggagtacgtatgaaagtttgttacataggtaaacatgtgtcacaggggtttgttgtgcatattatttcacacccaggtacctatgtccagaacccaatagtttagttttcttttctcctcccctccctcattctatcctcccccctcacatagaccccagggtctgttgtttccttctttgttttcataagttcttatcattatcatacttataaatgagaacgtggtatttggttgtctgtttctgcattagttggctaaggataatgtcttccagctccatccacgttcccacataagatataatctcgttctttttttatggctgcatggtatttcatggtgtattttatatatatagatatatagatatatatataaatatatatagatatatatataaatatatataggtatatatatgtcacatatatatatcacatatacaaggatatgtcctctagctccatccatgttcccacataagacataatctcgttcttgttttatggctgcgtggtatttcatggtgtattttatatatatatatctatataaaaatatatagatatatatatcacatatatatagcacatgtatctatatcacatatatatatatatcacattttctttatccagttgggacagaacaagtcaactggcaagtccattgctcagcttgttgaaatactctgcacagaatgcaaggaaaaactgttttcatgaggtagcccatgaagcgatgaagcaaggcaaatttatctgcctggataacctcctgtatgctgttttcactccatggagagtcaacacaacagacttctgagttgtattatcgagctccttcaacagggcattgctgtaagatcctagatcccacactccatggtgtgatgttttagccaagtctggaagtagcacaggccctaaaatctcatgattgcaggttgtcaactctgctgtaggcttgccacttcaagggcaagtggttggttggggctgggatttgggcagagccatagaaagaaagggaacattcaagggaatttgatgatgtgcatgatgtctctgtctgatacaaaaagaaaaaaaaactctaaaaacatttgatacatagaaatactagtatttggtgagattgaatgtgggaagatgagggataagaaggtattaagaatgactcccaagtttctgacttggtcagttgagtagaagggaaatttttatttttatttttatttttaaaatttcagtaagtttttagggaacaggtggtgtttggttacatgaataagttctttagtggtgatttctgagattttggtgcacctatcacctaagcagggtacactatgcccaatgtgtagtctcttatccctcaccccccatcctttcccttgactccccaaagtccattgtaacattcttatgcctttgtgtcctcataatttagctcccaattgtgagtgagaacatatgatgtttggttttccactcccgagttgcttcacttacaataatagtctccaattcatgccaacatctattattttttgattttttgatcatgaccattgttgtaggagggaggtggtatcccattatggttttgatttgtatttccctgataattagtgatgctgaacatctttccatatacttgttggccatttgtatatctgagtagaaggtaattctaataaataaaacaggaaggcagcagaaagaggtttgtttgggatatggcttgattatttgcaagatatttgctgtagcttaggagaaaggtggatgttggtgatactgattttgtcattatctgtgagttaaagtttctaaaatcacgtggcttcctagggaaagcatatagaatgacaagggaagatggctagatggctagtaatggcaccctgaacaacttcagcatttagaggtgggtggaggaggataagcccatggaagaaacagaaaggatgggccagcgagatgagaggagaagctaagggagtagacagttaccagagggaaggtgggatcagttaagaaccttagtatgttgcaaagaaataacctgcaatgcggaccaacccggggaacgtctgtaaaaatgatgacaattcttaattgtaatttaaaatgtaattgtattgagagctctctctgtctttgtctcatcataatttgaagcagattaactacatattagctagaaaaagccctttgaaattttccttcaatgtatcaatagattctatgactttttgtaagtagaaactgcctattggtaaaatagcacttaattgagataatgcttgtgaaagccatttctaaactttgaattgacatacaaaataaaggtggcaatcatcaccatgttgctatactgtctttggccatataaaatttttttcaacaatacaaagataagccttgtacaaattcttcaaaattctaaatttgtggtacttgaataatgttttactatatataaagatgaatagatagcatttcctacaataaataaataatttatatatcaatgtgttgggattataaattctcatagaaattcactttattaattcattcattcatctgatcacagttcattcagcaaataatttgttttgttctttttaagtgctctgggaagaaggtattgtgacagagtcccttctctcaaagcgtttatagattcatgtgtttggggaaagtacagaacaattattgaaataaaaccagagtcaggcacattgctatgccagctataaagagcctatgaaaattaggaacattgacacatttgttcctaacctggtttgtgctttcaggattcctctgaagtggcagcactccttgggtttgaaatgttcgtcagtaatgactgatggacatcaacaggtgaatagacacacaaaaaacctatgaaacttacataccataggttactattcaacaataaaaagaaaaactgttgatacatctaacaatgtagatgaatctcaaaagcattatgctattcctttggctgataaaatggtgacactcctttatttctctttctttcatcccacttttaaaatcagccttagtatactttaggcacaatatactatatacatttaaaatgacaatttgacaagttttgacaaatgtatatacattataaaaatcatgataaagatttccgccgcctcaaaatgtttcctcatgccttcttggaataaatccacacattccttccttctctacaccccaccacccatatactctacctctagacccaagcaattgctagtctgctttttgtcagcgtaaattagtttgcattttctagaatttcatattaatggaaatgtacagtaagtactcttttgtgcctgacttcttacatttagtatagtgcttttaagatttatccaaattgttgggtgtatcaataatttgtttctttttattgctgagtagtattctattgtatacgtggttcacagtttatccattcaccagttaatggacattccagttgttttatatttggggctgttatgaataaagctgatgtgaacatttgaatagaagtctgttgtgaatgtttggattggaattgctgggttgtacagtaagtgtttgattaacttcataagaaactgccaaatgattttccaaagtggctacatataattttgcattttcaccagcagtgtatgagatttccagttgatcctcatcctcattcaaaacctggaattaagagtgaatcttttaaattttagccttttgagaaaatgtgtagtggtacttcattgtagttttagttcgcacttctctaatgactaatgatgtttaacatgcttttatatcttcttttgtctccatctattctttgttcttcattctcttttcttcctttagagtaagtattttttattttattccattttcactattggtatattatctataaattctttgttgttgttccattttagtgggtttacaatataaatctttaacttatcacagtctgtcatcaaataatggtataccccttacatatgttttaggaaccttacagtggtaaaaatatcagttccccatcctgtacttgttgctattgttttcatgcattttattctgtatatattataaactctacaatctatcattattactttttgtttaaatattaaattctttaaaagagatttttaaaaataagaaaatagtctttcatattttctcatgtatttgccatttttattgttttttttttcttccatatttgagatccaaatttctatctggtatacttttccttctgcctgaataactacctttagtatttttttgtagtacagatctgttggcaatgattatctgaacttctgtatgtctgaaaaagcctttagctaatttttgaaagttttttgatggacatatgatatggtttggccctgtgtctccatctaaatcttatcttgaattgtaatccccatgatccccatgtgtcaagggtgggaccaggtggaggtaattggatcatgagggccgttcgccccatgctgttctcctaataatgagtgagtctcatgagatccgatggttttataagtgtctgacatttcccctgcttgcacttctcctttctgccaccttgtgaagcaggtgcctgtttccccttcaccttctgccatgattgtaagtttcatgaggtctccccagccttgctgaactgttagtcaattaaacctctttcctttataaattacccagtctcaggtatttcttcatagcagcatgagaatggactaacacggtacatacaattacaggttgctagtcccttttttcccttcagtgctttaaggatttcactcttccatagtttctgatgagtagtctgaccattcctaactttgtgccattattttctcatttttttctgactctcccttctgggactccaattacaaatatcccagacttcctaactttggcaggtcaagagatcgagaccatcctggtcaacatggtgaaacccagtctctactaaatatacaaaaaattagccaggcatggtggtgggcgcctgtagtcccagctacttgtaaggctgaggcaggagaatggcttgaacccgggagggggagcctgcagtgagctgagatcgcgccactgcactccagcccgggcgacagaccgagaatccgtatcaaaaaaaaaaaatcattcaaaagattactgatgcttgtttcatttttttttaatttttcaactggtaattaatttattaaaatagttgacttatacgtctacaatggtgacttccatctcaactcctggctcaatactgatggaagtaatctgcttaacaatctcagaaggactgagcaagtcaatgagtcgcttgtggattctcatctggaaatgatcccatggcttagaaccttcaccacatggagttttttcttgtagtgattctcaaagtcttagtaggcatttgaactggtcttttcactttgagattcttttcctttgctcctctgatcaagtcagcacacaccttcgccagggattttacattgcagcttgttagagtgattcgaattcggtgaattgccatcttcggctccgtgggtgtttttccggtatccttaaaagccatcactgctgcgcggcttcctgacctacttgttccggcaagagtgaacagtggtgagtcaggagcaggtgcgggcggatcagagctccacaacacctacgaccacctcttcttcaaagaggtgtttcatgttttaaaatcttaatttccttctgtttcattttggataaaatctgtcttcaagtttggtgcctttttttttgggccaatatctaatctaaagttcatcctatccagtatgtttctcatttcaaatattgtattttctatctgcagagtttgatttgtatttgaaaacgttttttaatctttctcattgtcttaaacatttggagtatacttataataattgttttactgttgttatctgttacttctatcatctatgaaattactatatctgtttctattgattgatttgattactattctggttgggaggcaatattttccctacttctttgcttacttggtaatttttttatcaatgaaaatttataaaagtgaacttcatttacaattggatataatgaattttacatttttgtgtcctggatttttctgtattcctttaaatattgttggatttcttttttttcccccctccgggatgcagataagtttcttggaattagctggatgcttttgagatttgcttttaagatttgttagggtgaattcagagcagggctactttgatctaggaaatagccctctgaagggtctcatgttctgtgagataggaggtctttctcctctgactggttggtagcctaagctattcctgattcttgtaaggtctggacactgttctgcatactcttttctgatagttctttccctggccttagtagttaccacacatctatgcacatagcggtattcagccaaagtttgaaaggattcaaagatctccagagctctctctgtatcactgtttctgttattctatcccacaaattctaagtgtgtgaaactccctgaaatcagaactatgtctcctcaactcagtgagaccacaagccactgtttgggtttcccctgcccatgttgcagcctagaaactctcctcaggcaaaaagatcaggcaacatcggggtcatctcatttccttccctttcagagatcactgtaattgcctattgaacaatgcctgaagaaagatgtttcatatattttgtctggctttctagttgcttaaggtaagaaggtaaatgcattcctagttactgcattgtggctgggagcagaattccaatactgttttttttataatatgcttttacttaattatttgaggattccctttagttatcataattttacatgatgtaaacaggtaaatgagaatatcttcaaaatatatttttcagttttggggtggttctctcagttctggtttttgccaaatataatagatttttagtatctgagttccatatgacaaaatttataaatcttgggtgtatccatatggtatgttataatcggaaaagatagatgaaattccgcttttgtctaatgtctttataggtcttggagaaacttgaagaagggttgtaaagtccataactttacaatgagacaaaattaaaagaatccaagccaaaattgtcctagacaatgaaaagtatcgctatgcagaagccaaatctcttaagctcctccaccatatcagtcatgacacagtctatagtttaacaattgtttcaatttggaaattaatttttagtactaatttaaatatttcatattagtatatgagaattcttccttctgttcaggctgtggtatggggaaaagtcagttcccatcaatgcagattcatatctaccagcacagtgattaaattatcctcatatcctcttgtgtttgaacaagctgtgtacttttaattttaatggatttaactcaatattcaatatatgttgattactgaatacaacaaaaagtgtaatagacactccttgagaagctcataatctatttgggcagatggaacaaatacttagaaaaattgaaaggtagtttaggaccacagtaaaaaaaaattgggggtgcaggatataaagtatcaattgaattgtagaagcaatatatactgtgtattttttcacctgggtgagagggtgagactccgtctaaaaaaaaaaaaaaaactatggttgttcaccataactaaacatttaatctctttcagtctatcttactcatctacaaaatggagataatacctgttttgcagtgcaggccctgacatacgggtagagttccataaatcctagcttctattccttaactcttttaactcttttcttccttccttctttctagctaatttttaactctctatcctagacaacttttgctaaacgtgtataacatgtagtacctacgcataggaatatgttttatagaacagaattattgaaaacagcttcttacatttctgttattttttcaaaagcaagaattcatgtattccttctgagccaagtacatgcaataaaaagtaagagagattcagaaattctgatgattattctcccaagaagagtgcttgctagagtgagggtcttgcagacacagaaggagctgatggggtgaactgctggggtgttacaaaaggccttcgggaaaatacgtaatctaagtcaataaatcatagagtgaagattccctcagggaaaaagggagtggttctgaagaacttacaaatttttccaggcaatagccacagatgctagcacaagggcattatggccacatagtgtgagcaaaagtgcttaactttttgcccttcttctaatatttactctattagcccagacaacatgagatccagaagcctcatgatgagtggagaggaaatataaatcagaagaaatggtcaaaaagatgcctatattcacttccgcacttaggtctccaagcctcagttcctggcatgagtaggtagaggagaggagcttggaataggatgtgagattacagttttaatatagactggactggatatttgaatacctgaaaatgaatctgaattctcaaaatgaggtggttcctgcaactgaaaataacaagaaagctacaggatcttctgccatgttatccaggggtggaaaagtgaaattcagtggagccaggttaaagatggagtttgggccgggagtggtggttcatgcctataatcccagaactttgagaggccaaggtgggcagattacttgaggccaggatatcaagaccagcctggccaacatggtgaaaccccatctctactaaaaataaaaaattagccaggtgtggtggcatgtgcctgtagtcccagctactggggtgggtgaggcatgagaatcacttgaacctggaagggggagcctgtggtgagtcaagattgcaccactgcactcccgcctgggcaacagagcaagaccctgtgtgaccttgtgtccaaaaacagacaaacaaacaaataccatgtggagtttgtttactctttaaacaaatatccttcatgtgttgaactgaactataattatagttagtagggcacatagcaggttttaataagatatctagttcttcctcttaaggtaactcgttagaacttttatgagaaagaactaaagaatttctaatggggcagctaatccactcttttgtgcactctgttctgctgatgatctgatgttagtcggggtttctgtttgagattcctgagccttaactgctgatgacagagttcaaaatcattgctttctaactttgagaatgactgcctaatatgacatcattttctacccctgagtgctaatagtctaccttattcctcctgcctgtccttctccttgaggaggaggatcatcaatgcactgtgtggattgaagtggcttcatacccttttgatgttaatgttctcctttgcttaaagtgtgaactgaatatggatccctcatttatgaagcaccatgacacttcctgggtaatgaacaattaaacagacttctcagcaatagtgactatttttctgatttttcacttcatggacaatattgtatgcaagttaaatttgcaactagcttgaggcttcacacatggtgagtttgagaaattgaattctctacctcaaatgtatttccttttccttgaactctacattcaggtcagctgtccagttcttaaacaacaggttttggagaggcaatgagtaataaaatagcattttctccttcaattctatctgcatttgaaaaaaataaccttttatttttgattcaaagaagagaggagttttcttgtctttctacatctgttccaactcctccaaatgcacaaaaattttttcagagcattccagagtttctcagactgcacatagaagattttgcatatagatacatcttggccataataaccttctactgaattagtagaaaatagatgtattctaggttttcatatctttatggcaatatgaatagacaaggctcttcttgcaaaaatatctcctgaactgtgcgggagatgcttggaagacccagtcaaaattacgaagtatcccaagtttgtatcctcctgtggcttccccgtattacaataatgtcattctgatccaggttccagtactctcaagcccttgtccttcccttttcattttagcttgcattcatccaagtatttggatggaaattatcaataccttatacgagaacgtatgggaggctgaggcgggcggatcacgaggtcaggagatcgagaccatcctggctaacacagttaaaccctgtctctaccagaaaaatacaaaaaattagccatgcatggtggcacgcgcctgtagtcccagctacttgggaggctgaggcaggagaatcgcttgaacctgggaggcagaggttgcagtgagccaagatcacgccaccgcactccagcctgggtgacagagcgagactcatctcaaaaacaaacaaacaaaaagaatgtaaatgattgggagttaaaattatgcttttcagttttcagccatggatcatgttttcttgccttgcctgattcctagagtctcactccatgatgtttcctctttattataaagattagatggctttgcattgctgccatgtggcatttatacttctcaagcagctgtgtcatcttattctaccgtttaaacttagttttactttaagtccacatctaaactgtttgcctgcatgcccagcactttttccaccctctacattttatttgactggagcaatcaccttagcctctctaggtctttgcttatcatcactctgctcattcttcaagcctcacttgattactgcctcctctgtgttgctttcctggatttcctcagtaagacatagtttctccctttcatacttctgtggtattaagtatgcaccagttacatgtgactcatctccaagtgctttggcatggagatattatttatgttccttatatgactactgaccacttttttctagactaaatattgaaacacttggccagataattttgcttaattttgagtttccttttatactttttaaaacaaatttttgaaattaaattacattttgttaggttgcaaatctgaaaaagtccaaggatgaggtgagtttgttgtggtcagttgggtagttgctaaactcatagctggtttgtgtctgctgaccagcacattgttagcctagagaaagtctacatggggaaccagattatgatgcaagcgttgcttggagagcccttgatcaagagcaaaacaggttggtagactcgagggatagttcagctaggtctgatggaacattccagttttgccaacagaaggaaaaacattggaagggcttatcttccccaggatctggatctgttccactgggtaacatttaataagcactaacatggtctcttctttcacttgccatttcctgtgcttctttttccaactactacatctcctttgacacattttctttttctttttctttttttttttttgagatagagtcttgctctgtcacccaggctggagtacagtggtacgatcttagctcaccgcaacctccacctccccggtccaagcgattctcctgcctcagcctcctgaattgctgggatcacagatgtgcgccaccacactcagcaattttttttttttttttgtatttttagtagaggcagggtttcaccatgttggccaggctggtctcgaactcctgacctcaggtaatccactggcctcggcgtcctagagtgctggcattacaggtgtgagccactgtgcctggcctctttttaagtgtatcaataccatcattttggctgcttattctgccctgggagccattctgtctctttaggaagtttttgcgtgtatcagatctcatcttttatattttgatgtttaatagcatttaaaggattttgttttgtgttttttaaatgatttgaaaacaagtgtgctcactaattaataaacagcagattcaaacttttgttgctttttcaagaaaaaaatgaaaaattctgtaacaatatatcttagccataaaacacttgtaatcagcactcctccagaaatttcaggatgtaagttatcttaatgattatactagaaaatcttggaaagcagggatatggctaactttttataacatgtatccctactgtcacaacaagagttaagacttaataaatacagtcatgtgttgcttaacaactgggatatattcttgtaaccacccaaggggttcattttgcctgctacctggatacagccaatttatcaagaaccaggaattgcagtagagaaagggtttaattcatacagagccagctgaatgggacactagagttctattactgaagtcagtctccctgaaaattcagagggtagggtttttcaaggatagtttgaagggccagggaatggtgctgctgattggttggagatacaatcatagggatgtggaaaatggtcctcatgcatttctcaagtccactccttttcttagttcctgcttagcggaggtgttagaatttgcttcttggtggggccacaggactggttggtgggtccaggtggggccaccagttgtcagaaatgcaaaaacctgaaaagacatctcaaaagaccaatcttaggttctgtaatagtgatgttatttgcaggagtaattggggaagttgcaaatcttgtggctaatttgttagtcctacaaaggcagcctagtccccaggaaagaagggggtttatttaaggaaagggctgttatcatctttgtttcaaagttaaactataaactaagttcctcccaaagttagttggacctgtccccaggaatggacaagggcagcttggaggttagaaacaagatggaatctgttagtttagatctctttcactgtcataattttgtcactgttaacgtttgcaaaggtggtttcactgtagactttataaacaccatatacttagactatactaagtttattaaaaatatttttctttctttagtaacaaattaaccttagcttactataagttttttactttttgaagtttttaatttttttgaacttttgactcttgtaataacagcataaaacacactttgtacaactgtacaaacatattttctttatatacttattctataagtgctttctattttcattttttccctttaaactttttaatttaaatgaagacagaaacacaataccctaggtctacacaggttctggatcatcaatatcattatccaccacctccacatcttgtcccactggaagatcttcatggacaataacacgaagctctcgtctcctgtgttaacaatgccttcttctggaatacctcctgaaagacctgcctgaggctgttttatagttaatttccttttttacaagtagaaggagtacactctaaaataacgattaagagtattgtacagtaaataaatacagcagtaacagagtcggttattatcattatcaagtattatgtactatacctaattgtgctacatttttgtatgcctggcagtgcagtaggtgtgtttcaccaggatcaccacaaacatatgagtaatgtgttgatctatgacattaccagagctaccatgttgatataaacaggagacagggaaatactgggtagaagagggcagttccctggcaaaagccttactcccaagcctggaaacctgcagtcctaaatgggaataggcattcctgtttgtgcatccaaatgttgccttttggcctgccatgcccctctgtcctgtatccatataaaccccaaatcccaggcttgatgagcagatgagcagacaaacagaagagcagaggagcagaagagtggtgctgcagagaaagagagaagagaaggagcatctgaatgtcaagaggagtttggatggggatggtcagagaggagatcagctgcaggacagccaaactccaggggaagatcatctctcactccatcccctttccagctccccacccatcctgctgagagccacctccatcacccagtaaaatcctcacattcaccatccttcaagttcatgtgtgacttgattcttcctggacactggacaagaacctgggtaccaagagggcactgagctggttaacacttaagccatctgcggatggcggagctaaaagagcactgtagcacacccactggggctttgagagtcacaggcacacacccctagatgccaccgtgggatgggaacccaaaagtgctcgccctggctcctgcacctatctgtctacatgctccctctcctataacaggcttgcacagcagtgactgcgcaacagatgagccacaccccttccacatgtctgcaaggggtatcagggaactctcccctttcaatgtcagtaggtaataggaattttttagctcctttataatcttatgataccacctttgtgtatgtggtctgtcattgactgaagtgtcgttatgtggtacgtgactgtatttattgagtggatggtcaattgtatgaggtacttgaataatgagtggtgtgaaccttggttttatgacatcttctgagagctgctttcaggtgggtataagaagagatatttctagtctaggtccccactccttttcttagttcctgcttagtggaggtgttagaaaaaaaggttggactctggcactattttcctccattggttatatggactcaaagccataacttaaggaagaatgtctatttttagatttggtgactgatttagataggttgctacagaaagtggtacaaagatatttcacacatagaatatcaaatccagggtgctttagcactgcattccaatggcctgggatggatgggtggaagccctggcaagctgaaataaaccagggcaagctcctctttggaattcacaagtctgacaactggtgactcaggctctagtcaggagacctgaatgttacgtctggcatcacgataccttagtttacagagattaatctaacaggccttcagttagtttgctttattttaaaattctgcttagctttttgttgcctactaaatttctcctgatgtatatttagatgtaggtgaaggctgtagatgtatgcactaccaacaccagcttctgggagggaacattttcccactcacaagcaagtgaactttgctttctccatgaagaagaatgacctgcatgatggctttcagaagtggagaacatggctcacagttccctccacagttcctccatggcctttggttgcatcttctctgaatggaggagcttgggttatgtgaaaagcagagctaccagactacataaatgttttagtgagaaggcagcaaattaaaatatcagaaattttgaaaggaaaggtttataatagttagatttaaaacatactttgaggccaggcagcgtggcttacgccagtaatcccagcactttgggaggccaaggcgggaggattgcttgagggcaggtgttcgagactagcctgcactacataacaagaccttgtcctgtctctattaaaaaaaaaaaaaggaaggaaagggaagaaaaagtgctttaatattcagaggcatgagagatgcaatgagtaatataggaccttctctaaggacactgggggagcactctacagaggtggttctaatctagcctggcaaatctctgttcccttcatgccttgtacttccttcttctttgtgactttgctaatgttattccttcctcttggacaaatttcctatactaaccaaaaggccccaagacacagggggaaatgtggtaaatctgagactggaaggaaattaccatctaatgtcactcttgtacagtataactattgttaatattattgctggggtcactcatttattcatatcacaaacactgactgagtgcctattatttgccaagcatgggcaataaagagttgaagaccaacaaagcccctgccttcccagaagcttatttgcttgtggggaaaataaacagtggatcaattaacaaataagtagataacataatgtcacggccaggcgtggtggcctcatgctggtaatcccagcactttggaagactgaggtgggaggatcacttaggcccaggagtttgagaccagcctgggcagcatagggaaatcccatctctaccaaaacaaaacaaaacaaaacaaaacaaaacaaaacaaacaataaacgaaacacatggtggcgtgtgcctgtagtcccagctactcaggaggctgaggtgggaggatcacttgagcccaggacacagaggttgcagtgagccaacatctccccactgcactccagcccgggtgacagggtgagaccctgtctcaaaacaaacaaacaaacaaaacaaccaaaaaccaaaaaaagtaatgtcagatggtgactgttttgaggaaaataaagcagggtaggggaactagtgataactggtagatttgggtttctccatctctggctgcttttgcatcctcagtaaggtgagagtggcaaaggaaattccaggttgactttcgggttcagtgaattttctaccccgtgtctcttcactgccctttccctccccagaacctctaaaatctgatccttagattctgcaatgtaagtcagcttccttcttcctggttgccagctcactacattcttattcctggataaaccaaaaatctcttccttgttttcatattttcaaaaagatgtagaaatctctcacctgctcatgttccttcctttttgtcttgttggtatatataccttttacaattctttcactaccaaatgtagttggatattgggatgtagtcacaacaaacacataaatacaattcaccatttttaaatggacttattcatttagtctgcttaaaattgagataataacacacgcaccagttgggtttctctgagaactctgggcatttttaatcctggcaatttttaaattgcttagcagtaaaacagtcagacaacagcacctattgttataaatccctgcctcttcttacctcaatgaggctatcctttctctctatcaattctgtcagcagaattaagaagagccattgatttccagtttgttcagcgtttttcttcttaggatgggagtgatgacttctaacctctttacatctagagactcaatttaagtctacttctttcattcagccttctctcttcattttcagctgcctggaatgtcttctttctctcagttcctatctttgacattaaaaatcacagtacttagttatattctacctcacaccaatcattttacttgttaatatcttttttcctagttagattgtgacattttggaataaaagaaaaatatccttttttactttatagctctccagatttcattagattagtatagattcgagtgccttttatatatcaggcaatgcctagtgtataatatttttacttatgggttttagcatttaacttatttaatgatcacaacattcctatgatgttatttgttttcataatttgttgaaatgaaagctgatggtcagaaaggttaaaaagttgtctggtcataatttttgaggaggcagagctaggttttgaacgcaggtctgtctgattctgagaataatcctgtgctccttcagctgaaccacacagcccctcttagtgctttgtctccatagacactaagtgtattcttgttgattgagtgaattaacgagtgaattatctggagctctttctgcttctgttttcttctctgtacaatgaggatcatcacatgaacctgatctaagaatagaatagtccaactgagttcccttaatttggtaaccaagagagagtagagttaattaactagaaccctttgccatcacttctctctaaacttttcatcattttcctctaaaagtccggtcctgagctctattacaagatagaacattttagcctctatcgaagagagcactattaatattttatggcattggctccttttttcctaatactgtgggattaaaataatgtttactaaattctggatgttcgattcctgttttttcatgatattttataatccaggccttcttcatagagacacagggctatgttttataactgccagggtcaagcaaagaacagcttgtgtgagatacttaaagaaatagctaagcagtaacttcagaccttctgtatattttcctcaaaattttctctcagtttttgtctccctacaactcatttttagaaaacaaaaacataacacaattttgcccttttaaaagataatacagctgggtgcagtggctcacgcttgtaatcccagcactttgggaggctgaggtggggcagatcacctgaggtcaggagttcaagaccagcctggccaatatggtgaaaccctgtctctactaaaaatacaaaaattagctgggtgaggtggcggcaggcgcctgtaatcccagatacccgggaagctgaggcaggaggatcgcttgaacctgggaggcggaggtagcagtgagctggaattgcaccactgcactccagcctgggcgaaagagtaagactctatctaaagaaaaaaaaatgtactataataatttacaaagtacagaaaatatctaaaggaaaagaaataacatctcacaacctcatcatctagatatgactgcaaaaattttggcatatttcatttcagcttttaattaatttatttttgcagaagacatttatttcagatattctaactttataatctgtagaattttaatgatatttttgtatgacatctatcataaacatttctgcatgtcattgaaatatttataaatgttatttttatttaaacaatgcataattgatataacccttctcttaaaattggtgatttcacatacctggggatgagccgatgtgaaacaaaagagaaagggtaagagatagctagtctcttgactcatttttttttttccatatgacttgaaaaaaagaacttatcttagagacctctagaatagttagcacaaatagatttctcaatgtggttaagatgaaatacagatactgaatttactcttttatgtgaaataaataaaaactggataagatatatatagcaacagttttcaagacattatacctcagacaacaaaggataatgacctctgagagagggaaaacaaattaggtgagcctgtgattgccccagtttactgcctggagagagattccaggccagggtgcagagagaagggttgcgaatggaaactattgctctttctgagttaaggagagagacctgaaagtctgcaggtacaaagatagctgcaattcatgagaaagagttccagagaaaagaaaactgaacagagagtgagctctggatttctgtagtgttcctgctgactcttctgctgaatcatgatcagtgcatgtgtgtggctggagaaagaacctctgaaaaggtttagagggacaaatccttagaatcacataggcctgggaatagctcctctttccaccagaaagagtataaaaaccatgaaattcatgggacattaggtagagtacttagaagggttttgcttcagcagtgagaaaaaattagtcctagaccaaatgttgctctgatcctaacaaaacttaaaaaatgagaccctaaaggataaaactgtttccaggtaacttaaatatataccagaacaaagccgaagactataggaatatgaaaatatctagcagtcagtaaggtaaaattcataatgtctaatatgcaaccaaatattaccatgaatataaagaagcatgaaaataaatacccataattccaagaaaaatcaattatacataattgccccatcaatgacacagatgatgtaattagtaaacaaagagctaattataactgccaactctagccattacacatgttcaagtggctagaggaaagatcaaatcacgacacagaagaaataaaaagacaataaaatatgtacagatgaaaattacaatatctgagatgaagcataagcgagatgggattcgcagcagattagatatagaagaaggattaatgaacatcaaaacatgtatgacaacagtagtataaagtctgtaagaaaagaaatggaaacatactggtataaggttttacactatgtatgaaatggtgtagtatcacttgaagagagactgtgactaaagaccactgtaacctcttagggaaagaaaaatatctttttctacccatcctgggttcacagctgaggccactataacaaaaaacagattaataacacagaagcatacacatttacttaatataagtgttatgtgacacagtagccatcataaggaaagaagactcaaagaaacagatctgagtatttttatagtaggtttgatgaagaatggatagtcatggagaaatataatggggcatataatacaatggggttatgatctaatggtagtaaactgggggaaatttagctgggtttgcttgttcagatttttctccttgaccttttgtcgtgagagacaaggatgtttcttttctctgggtatagggagggcacctctcacatgagggacttatgatctgcttcagagaagtgccagggaagaacagagtgaccgtcctgcttctgcagttttctcaaattcatacagcttaaaatatttaacatgctaaggtgttacattttggggtagtatatcttgatacccatcacctgaaaccaaccactttataatagtaacacaaagagttgtacataatataccataaaggtggtaaaatggaatcattggaaaagtcaattcatccaaaagaaggctgaaagaggaaagcaaaaacaaagaagagatgggagaaataaaaattaaatggtagggacatgagcatccattaattttggtatacaggaggggcttgaggggtgtcctggaatcaatccccctcagataccaaaggatgactgtatattttttaaattaagagactttcattctttaaatattcttgacttacagttttttaaaaagaaaaaaaatcaaagcatagtatagttgttaaatcattttaatagtatattcagtggctgaaatgacagggagtatcaatcattatttattcaatataaagttatccttactgaaaaaataagatataactgggaaatatgcttggatccctcacacatccacttaatttcttaaaggaagaaagatgaaacacatgtaagaacagaaacaaataaaccatttactgtaacattccaggaattgtgggatccttttcttcccaagtttatttatttgcttatctttatctcctagtggtagtttgtttcctttggtagaatatatggcagtcccacattggtgacacctggtgctcccttcatccaactggatcactttgagattcagttttacacctttttagcattttctttgtgttcatatatcagttatgatgagccactgataatattttgttctaaaacgaaacatattacttagtactttttttattgtctcgctgacttttaaaatttgagtgatgtacagactttgtttttttaatgaaatataaatattttctcatggtttctaaattccttataaaattaaattaattcaatctgcaaaaatattaaatggtaagagaataaactcatcacttagatgttcatattaaatgtaaatggcctaaataccccaattaaaagttaaaaatggtctaattgaataaaatacccatatccaactatatcttgcctataagaaaatattgccacttgcagtataaaaatacaaataggtaaaagataaaaggatggaaaaagacatactattttaaactaataaaatattaattaattaattagtcagatttcaggacctttttctgaataattgatagaataaacagacaaaaatatcagtaaggatacagaaaacctccaaaatattatcaatcaccttgaattaattaatatttatggggccaggcttggggctcatgcctgtaattccagcactttggcaggccttgagctcaggaattcgagacaagcctgggcaacacacacacacacacacacacacacacacacacacacacgtgtatatatatatgcacacacacacatcagctaaaagcagcagaatacacattttcttcaagagaacacagaatatttagcatgatatgctatattctaggccataaataaatctcaacagacttaaaataattcagctaatacaaagtatattctgtaactacagtggaattaagtttgaaattaatagcaaaagatatctggcaaatccccaaatatttggtaactaatatcatacttctaaatgacccagggtcaaataagaaatcaaaatagaaatttgaaagtgtttgaactaaattaaacacacatttcaaaacttttgagatgcaacaacagcagtatttagaggaaaatttataatagtatagacctatattagaaaagaagatctcaagccagtgatctcagtttctacctgaagaaactagaaaaacaaaacaaataaatccaaaataagcagaagaaagtaagtattaaagaccagagctgaaatcaataaagtagaaaacagaaaaacaaaacaaaacaaaatttaataacacccaaaacttgttattatacagatcagtaagattgataaaccactggtcaagactgattaggaatttatcaagaagaaacgatttcctttttttcatactgtatatgtagcacccaaaaataaataactttagtataacatttattcatctaatacagaagacagaaatgagaaaagtggcatcattacaaattctacagatagtaaaagaacaataagataatatgataaaaaactcaggccaataaatttgacaacttagataaattgcacaaattacttatatgacacaatctaccaaagttcattcaggaagaaattgataatcttagtagctgtatatctattaaagaaattaagttgatagttaaaaattatcctacaaaacgtattccaagctctgactgtttccctagagaattgtacccaatatttaaggagaaagtaattctaattctgcgtaaacttttctaggaaattgaagaggaggaaatatttcccaactctccctgaggccagtgctactctatccaaaaccagaaaaagacattccaagaaaacaaaactacagaccactgtatgcaagaagcaatcggaaattaaaaattgtaaaatatcatttaaaatatcagaaaaagtaattatgaagtacttaggaacaaacctgacaaaagtggctcaagatttgaacactgaaaactataaaacattgctgtaagaaattaaagagggcagaaataaatggaaacctcatttgtgaattagataaatttaacactgtgaagatattaattttccttaaattggtctataattcaacagaatctcaatcaatacctcaataggcttttaaaaatgcttgcaaaatttgacaagctaatcctaaaatttatatgaaaatgcaaaggacctacaagaggcaaactatctttgaaaaagaagagtaagtttggaagacatatacttgccctcagagctcattataaagctacagtaatcaagacagtgtgagactgaaataaagatagacaaagaaagacaatttctaggtcatgagagttatgtttcctaaaggaaggcagcagatgcttattaactttccccgtgccctcaggatgccttaaacagtggttgccaaccactagcagctttagcaccacttggaagctttttagaaaagctaattactgggcccatcccagacctactgaaccagaatctctgtgggcaaagcccaggaatctgtgttttcacaagctctccaggtgataatgatgtccattaaagtttgagatccattgccttggcctttccctgctagaaatcctccaggatttgggagacaggggaagaggtctggagagagtggcagaattcaacaccacagaatgaagaggaaaattgatggtctttgtccatggaatccattaaaatatactctcattgctgccaggctgagctgatgaataaaaaataagctaatctcaaatcaagccatcaggctattgatgataattgtgttttagggtgagcaaacagctttaccaagctcacacagttgagacaatttgttgtttggaactatcttactgtaagatccttaagaagaatgcagaagtatgaaaataaatccaggactcagaaatctttcaactaaatctttaaaattctctctctcatgcacacacacacatatgcacacatacacatatagtaagatttcatgacacatgagacaggatgtgaagctgaacagttcgatgaatgcctgagtggtaagatcaccttgaagaaccagaagtgagggtctattctagctgggtatgagctacaaactcatttcttggggaacacatgaacacatcggggaggctaagtagcttctgaggctactaatagaatttcagtcatttctcctgtcatctgaaaaatatatgatattgaatttctaaaaatgggtttagtgtagtctagtcttactgtctaaaactaagatgtggcttattccaataaccaaagtgattccatcccatgtgagggaaaaaaaggataatggtgaattaaaagcacctgcgtgtatttgttgctcctttagaggagtctctcttcatcaacgttaactttctttcctacttttgatctggctgctaaaagtctaggtttagatctcaaaccattgtccttctctgcatgatgtaatagttacaattacagtctcaaccctctggcatttaatgaagatgaaattgatttctttagactgaaaacaaaaaaatcacttacaatcaggatactgaatatggtagcaagtacaaggtcccagcttctagtagacttggcagactgtcaagctcttactaagtgaccccaccccatgcctttttgtcttttctgttgccacacaattacaataatttgttctctgaatgccagagtactgacaaggaaaggaattctgaagctggctgagagaagtcgtgtaaatctcccaatctaggctccattgactcttgtctctttctttgtatggaactgattttataatttctgtggcaatgaaagactagtacccaaaatgactgctggtcctttgtttattgatcaatctgagcatggactagaattcatcctccaattggtaacaagaaaaaattggatggggaagcataccattggctaaggcagcacagcaagtttgaatttggctgcctcttctttcaatattggttgacatcatcaagagcagacattggcgttggagttaagagtatcaagagagttaataaataccaatttagggtaatattttatgcctagtctttatcttttggtgaagtggtttctaatatcatctcagactaaatcttatgggatatttctacttgtagatgctaaggtattaagaaaaagctcaaagtagttgtgttttccttatcttcctaaaagtttagattaaagatgccaaaaatttgtgtgttggtatgtgtcaaagcatttgaatgcccttgtagactattaaaacctttgttctgtaccaggcactgtattgagtatattgcatgtatttattattatatttagttctcacagcaaccgtacacaataattacaattccttcctttcactaaggcatagggagtttaaataaattagccacagtacaggatggcataaaactgtagcagagccaaaactcaaacatgtctctgtctgactcaaaaacataggctcattctcctagagccaggcaacaacctgaaagctcttgagttgacttttctagttctgtggatgaatgcaatcatctcaggacccagataaacagaagtccttctttcttattcgtatttctcagtactaggccagtcaggacaaactctgttctccatggccgtgatcttgaagaaattgagatttcatccaaaggaaatcaggtattgaaacgtgtgtttatgtgtattgattaatcttctgcctgtttctggaaacatttgaagaaatataacaaaaagcaaatatcctgaaactgcctaatgaacctgatctctctctctgtctttccctttctctctcataggtcttttgcctgtatttctctggtggaatttactaaataattatatcaggtgtcttcttattgtacttgactgctttcatcaaggtaatcttgaggacagagacttcctttgttagccagggcactctaggggaacagaaattacacacacacacacacacacacacacacacacacaggaactggttcatggaggctaaaaagtctcaaaatctgcaggccaaaggcttgagaacccggagtcctcattgtgtaagttccactcagagtctgaagaggggagaagacagatgtcccagctcagagacctttaggcagagagagaaaattctgtcttgctcagcctttggttcttttcaggcctccagtggattagatgaggctcacccacataggggaaggagtctgatttcctcagtctaccaatgcaaaggttaatctcattcagcaacatcctcacagacacacccagaataatctttcaccaaatatctaggcactttggcccagccaaatagacacataaaattcacttccacactttcttactaatccgtgcattctctccaatacagggcacccggcctggcaaggagtaagtgctccatatatatttactaaatgacaagagatgagattatccttagactatgactcagatatagacaatcaattattaataccctatcatttttccccactctgacaacccaaactgaaaaatgttgggattgccttttttgacaatatgattttctctgaatgcagactcatgttttgaccttccctgtctgttcctgtttagtattcatgctggcttaactcattgattgatcaagtaaccattgagcatctgccgtgttaacactctgaacaagatcctgtaatatgaatggtgtttagcctgatgaataaagtgtggtgtctgtgcattcatttttatatatttattgtttttaaccaaactttacccatgtaaagaataacattgatggcaggaacttgaatttggatctacgtacatgttccatttcagactcaccatgaaatgaggtgcttgcatttttcattgctgattttacaatacactttcacaccttttgggtaaaattttgcaatcaatgtaactgaggcagcatggtatgaaagcaaccctggaggtggaaatagaagactagaatttaaatcttggttatgccacttattggttgtatgatttttgtcaagtcatttgacccgtgtctattcagagtttctttgctagaatgaaggagttaactagaatttattgatctcagtagtcagtctcctcaggcacagataaatcttggatatgtatcctgagatagctttcccatttccacattgaagacaacattctattttagagcaaaaatgaattatattatttaagaatatgagtttcagaattcagactcatgcttacgggtttgaattctagttctgccactttcttactatgcagactttagcaagtcagttaatgtttgtgagcctcaggtttctcaccagtaaagcagtgtgagtaataactatcatattatattattacaagcataaaatgaaataagagtacttggcacaaagaaggatcttaatttttagctttttaaaaaagctgtatttgtttatatgcagtatgtatatatatattctcaattctattattatagactatatttattatgtttttcataaagtcattagtttcactcaggaattagttgacccttgtgagatacatggtttgaccacttttcactttgatgttcttcagaaaataagacaattagaaatctctgattgtaatcttcatgtaaaatattttacagtcatggctaaaatgatcccaggagtggaatcatacacataaattcttttctttattctaataatgttacctttagtgtctatgccaagcaagtatgttatgtgttgagataaaaattcttagtatgtttgtatgtgacattcccaactcccatcccactgaagtctatatttacctagtttctttcttttgttttcctctaacattcatgctattttaatcaatgttctttcattttgaagcccccaataagtttgaccccaaagactttcagtttgcccctgctattcataagcatacttatgacaatgcatgtctcccattcttttctcatatttacaccgatctttttattgggacaaatgggtttgttttttcatgcttgtgtttaatatctcactgagttcagcataagttattaaacataattttctgttttctctttctccctcaagactttctttttctctagacctttatttcctaactccagagtatttgcccaggtctataggcccctctctcttttgctttcttaccaacccatccaccttcttctgtttcctattgcccaactggcttcacttaaacaagagcatttgttatttgtacagagtgcaacatataattgtcctactctgtttggttgctataacaaaatatcatagactaggcagcttataaacaacagatatttatttctcatagttctggaggctggaaaatccaatatccaggcactactggcagatttggtgtctggtgagagcctacactctggttcatagacagccatccatttgctgtgtctccatatggtagaaagaatgaataaagtttctggagtcttctttacaatggcactaatccattcatgaaggtttcatcccatgacctaacaataccattgtattgggggttatcttgcaacatatgaattttggggaacataagctttcaatctatagtaatgaagtaggaaattttccctgatcctttcatgggcaggaactggagtatgcctatttcacagaggtcttatcagataaaaaaattctccattaaatggcaaaacaagtaaccatttgggattcctgggtgtacagtgcctactattccaaaatgagattattgaggctaacatgaccctttgtatacaaagacgggggcagaaataatatttctagcaaatccacacatctcaatcacatttaatttcacaaaatttacttctaataagcattgttccaactaacaaaccatctggtgctagtctaagatagagatggctgaagtgctcctgattccagtattttaggtgttaaatctccattctaacattgtcaatccttaactggagtactcaaatattaactaacttcctctaggatataaattaatatgtataccacattctatgtgaattattttaattatattacatgccatatacaaattatatataggtttagtcttcctgaatattgcaagttgagtctgtgagagaaaaaattaggatgaattgagaataactagaattcagaattctttttcattaagtgttgactgtgttaactcatattcccggttaggtagcaagtcctatgaagtgtgattttctcctaacagctaaaaagcagaaaaaaaatggatttattctagttaatgacttgctttttctatttttatagaaaaaatgaagtaaattatttcacttttcttgatgctattactattttgtcaggaagatagatcttctaaattttaggaaactatgaatctaagttctatattgctctcatttcctttttctctttgtctctcttctgttgtagcccctccctcaccgctaagccttcaccctgactctaccctgcccccactgccttttgttctttggaagacactcattaacatttgctaatgtatgctaatgagcaataattagcatctctaatgtgaacaaaagcagtgctacaaaggaagggtaaagatgtgtacagagttcagccagccttttatgcttctttatgccttaggaacaatcctcttctttcagttctttcacaattctttagtgttttttgtttgtttcattttgtttgcttatccatgaaccctgaaaaccattcttcttcttgagttagaatattgcaaaaatgctacggaggacagaaagattcctttttgtcctaaataacccaaggatataagcacagctgctaagaggttataatgcacatttgtattttcatctggttgttattttggtatcctattactagaaaaggttttaaccagaaaacctcacacaagataatgtatttcattttaccacacttatttacagtggttgccctttatggtggtaattgcaatgtgaaagcatacactctgaatatatattatgacagcatggttaaataagaaatgttccctccctcaaacaatctaaatgcaaagaaaatgcaagactcaccacttactttttcataaccacagagggctctaaatgtctttgtaaatagctatttatttattgaatatgtatagttttttttttgaaaaagccagccctccaaaccacatagagtaagagctgtttttgttctttctgtagactgatggtgtcgtgaaatacctaattgcagtttctcacaaatactccagcatgtaatttgccatttgcagaaccaggcttcacatttcatatttgctcttccagctcaggggtggtagaatttggaaacataccagcaacccacttcactcagcctgtgtttaattataatttcacgtacaataaaagcagaaggaaaacgtgcaaaaaaattggtgtgcatccctttcccctccttcttacgtatataaaaaagatttatttccattgtaaaaggatagaatggggatctttattttgagtagattttctatttttgttctttctgtttgcctcagagttagtgtcctctctctgtgacctcagagtaaaatgtgtttctccataggcttcatcctgttctatttatcaactatattatatttatcaattattttatattgtgtttttaataaagcagacatcagcagctatttattttctacttctgagggcctaaagagtctcagaaaatgagtgtaatctagaagggaaaacattgaagagtgacagctattataacagttgtgatttttgcctgcctccctcttttggattggtgagtcctaccaaaaaccaaaactattattctccttgtaattttgaaaccacagagattgaaaataactatttagtatctccaagatattataatgtttgaaaatatgaccagttttgggggcatttattacaaaagtttccagtagggtgtttttgaatgtctgtgccctctggttttcacaaaactggtcttaaggaagataagatactggtacacacagaagaaatatcagcctacgtctgtctcattaaatcttatccccagatactttgatgatatttaagtgtaatgatctcattctgtgtttctcactcctgataattttttaaatgtcttatagcttacaggtttattaaggtatttgatttatttaagaactacataattattctcttcattcaatggcttctgaaatattatgtttaattctatcatttgaaggacttgggattgttataaacaaatggcacgagcttctttttgtcctgacctagaagtagcaaagataaagggagctgcttagttaacctgagtgagatttaataatcttgggtatattttattctagagtaagaagaattgcaccctattacttttattcagttttgtatgcagtagcttctgttgtctacttcacaaccaccaatagtgttatcataaattcagagtgttgggctgtattagcccattcttgcactgctataaagaactacctgagacagggtaacctgtaaagaaaataggtttaattggctcatggttctgcaggctgtacagaaagcatggctgctttctgctctccagcctcctcatggaggcctcaggaaacttacaatcatggcagaaggcaaagttgaggaaggaggtacctcctacatggccggagcaggaggaagagagagaaggggaaggtgctacacacttttaaacaagatcttgtgagaactcactattccaggaacagcaaagggaaagtctgcgcccatgatccagtcacctcccaccaggcacctcttccaacactggggattacaattagacatgagattttggcacaaatttgaaccatatcctgggccattctctatatggagatgatgcctgaatatgatttggtgactcagtctagcatccaagtggctcattgttgggcaattcttctttagtcttctttagggctaattttactcattccttttgaaaattggattgatttactttttgtttggttttaagaaagcaaaatatctaaatgctgttcttggcatagcttatatacatatacatgcatacacatgtgtaattttcttcagatcaaaatatgcatccccatcattcgtattgctataatcagaaattagtaatttgaggggcaactgaatgaccttatacctagagttttcagagtataatattacacagtgtgtattcataagaatgctgccttttaaagaggtttttttttaaaaaaatcatagcttattttttatagtttcactggtctgtcctcccttttctctctttttttcccccttgagaagagagatttcacatttttgttaaggggctcataatttccttatgaaatatgacaaatttcactttatcttaaaagcaaaatattaatagtacagacagctgaaggtggtctgagttaacctgagttacacattttatatatatatatatatatatatatatatatatatatatatgttaaaaatatttatttgtcatatgtagcaagactaaaatgcaaaattttgctttatgcttattcttttccagtatcatttactgtaattctcaccccatatttatttttttacttctctttctgtttctctcctttctcctctcattctttttctttcttttcttctccctaccccatcttttagttccatacttttgaattgctatagtggactcaaatctaagcaagaggtatattagtaagttgttcagtcttttaacaaagtatcagtcagagaagcacagcccagggataaaccaaaagcagaaataaaactgaggaattaataatctaattcgtgttgttttctttacattataggtggttcatttcatagcctacatcttcaatttctcaattctcattagatctttcttaacagcatataagaccattctaaatagcaaaaatagctgtatccttttactcactgcccatcagttcataaagccacttgaattcagctttttgcccacacaactgcactaaacatatgcctgccaagatcatcaatatctctacattgtcaaatccagtggtcaattttcagtccacattgtacttagcaacttatgatacgtctctgatgcacatcttctgccatccacaatctctgactttccttctacttaagagctgattgttcatttttgatttcttcagtttgttcttctcctgttcctcaccattttgagtctcctttttctgttttgtttaccctcattttctttgttatctcatctggtcttatggctttaaatacaatgtttttgctgataattccctaattcatatttccagtccagacctttcttctgaactccaggctcaaatattcaactgcctacttaatgtcatgcttggatgtctagacagcacctgaaatccaacggatctgattaaagtcctgatctttaacagctcctacctaagctattctccctacagtcttccatcttcttttcctgtaattccattcttcaggtgctcaagcaaagaacctgttgctatccttgatttctctatttctctcacatcctacagggatgacatgggttcatttatgcctgtcatgccactgattaacatccctatcaagaaagtttagtctgaggtaaaaacatccaatttgtatgagaagggccaacattgacattcttcgtacacaaaaaagaatcctgagaagaaacacaaaagagctaaataatacattgctgttgcagcttaggtaggctggagaagaaacccatacataatctcaaaccttactgttataaagtcattcttttttttttttttttttttttttgagacggagtcttgctctttcgcccaggccagagtgcagtggcgctatctcagctcactgcaagctccgcctcccgggttcataccattctcctgtttcagcctcccgagtagctgggactacaggcgcccaccaccacacccggataattttttatatttttagtagagacggggtttcactgtgttagccaggatggtctcgatctcctgacctcatgatccacccgccttggccatttttttttttttttttttaagagggagtcttattctgtggcccaggctggagagcagtggcacaatctcggctcactgcaacctctgcctcccgggttcaggtgattctcctgactcagcctcctgagtagctgggattacaggcgcctgccaccaagcccagctaatttttgtgtttgtagtagaggcggggtttcaccttgctgtccaggctggtcttaaactcctgacctcaagtgattcatccacctcagcctcccaaagtgctgggattacaggcgtgagccactgcgcctggcctataaagtcattcttttgcatcaaatagtaagactcattaaaggcagtggtattttcttttactgtctacaaacccttatccaagagcattttctctatattcctttgtgagcacacaataaatggtaattcaataagtgaattttcagtttccaaaataataacctggagctataaacattgcttcaagaagtaaatgtgggtcagagaaaaaggcaataccattcaactcttctggccacttggtcactgtgttatcctgaagaagcataaactactttcagcattatagatttaaaaagaagccccagaacaacatccacttttctgaacgactcctatgcctctgaaatgtgacattttgctgttgtttctttttactgtttttaattactgagtctatctgcatgaaatgaggatctgggttgcctaggagttcatctgctcctattgcatattcctcttttaactacacatacttcaatgcagttttgcttgctgcctccaacattttgacagacttcccctcctcttccttcactatcctcccatcactctccaggagacaaggttatttttaaagtgcatgatcaatgggcattggggagcagctgaggcatgaagagatcatacgattgggaataaggtactagggactgctgagagaaggaatggcaacatgccatctcagacattgtctgagaaaggaaagggtttgtagctcccattcaagtattctgagctatctcttcacacaggtttttgtcttggagggagttcttaacatagttctttagcattgctttaagttgaaggagatataggccagtgctgatagttacttttcaggccaaataatgttccattaaaatcgagcttgctctgaggatcttggtagtgtcttaaatctcctggtcatagtgctgctatttggttcttgatgcttatgacacctttgctgagggtttgaatcaagaacaaaacaagtattatcacaatgactataaaacatgactgttccacgatcagacaaaggaatgctgttaagcaaagaaggcacctaaggagaatgtggagatgaccatgcacagaccagaatcactattggaaaaccaactcaagaggagggactgggtcatttctgcagcagtcttcattgcatcactgagaaattgcagctctgttttagttctctacttgccaccacagggaatatcttcccttatggacttttaggttttatttaatggttatttataaactattccttctgtgccggagaagatgattcatgactctagccctgctttttctctcccgtggttattagaggaaactgagttgttgcttatctctttagcttgggataccttattctgctctttttatttaatatataatctttcctaaagatttccttatatttttgttcatttagtaggtttttctgttttatttaattaactttatattatcacattctagtgaaataatcatcacaaatcatcctaatacatcgtgcaaatgttttaaaaatgtgctttggttgtgcatatcgcaaagtaggctgtgggtcagcatttgctatttgtcctcagctgtttcttctttatatataactgataacaccctgctccaatgttaatcttatatcattaaaattctttcctagagaatccttctttgactgaagaagcttagtggtgacattaattgcaaataaaagaccatgacctattgtagaatgtggaatatctccttagaagtgtctgccttcattattgcaaactttcagtagtgacataaagatctttgtcctgtgtagtttcagttgcagccagcaacagaaggcatatgttcactttgaacaaaagaacatttattttcacattctgtggctgatgttgagtgataacatttttgcatatcctaaaattttttacccagatgctgtttaaaggcaaaaagtgcttttacaataatattctttgtgaatggaatttacactcttggcatgtgttgccttttcaatatgcccatcaagttctgaataataacctttgacagtgagtgaacagaaacaaaaccagaggttgtttcatctgttcacagcaacactgtttgtcatctttgcttttttggaaaaatgtcattccaccttaaataaaaatatgataaaattcatgttttataagcaagttaatagacttcgattattaagaaatattttaatttttccaaggcaagaaacctgtgatgaatgaacattaagttgacaaaagaaaaaaatatgccaataaatatattttttcatattactgtagtgtcaaaaattttataaaacttttatatgcctttataaaaatgaagcaaagctaagaagaagatgctgtatgtgttatggggtgaggaataaacagaaaaagtgtcctttgtcttggaaagaactgtaaaatcacctatctccatgttgccaaagggaatcacatattgggaaatttaggctatattaatataatacgtataaaaataattgaaatagaaaagatctggctttaagcatttttctaaagactttttcatgcttggtaaaagtgtttggaataaattattctctatttttaagtagttaatttggttattaacctaattggtatgggcatgtggatatagctttattaacaattcaatttctcatgaaataaaataacccgacaaaccccaagtctacttattgcaatacagaatttattttggttgaagttattttgaattgagctgatagcttataactttgaattgggcttataactgttatgttttgcaaatccctgaagattatgaaatagaaaaatctttgcatggcattgtataagatgctgtagctgtatatctttaataaatcgtgctcattttggcaagtttatggaaaaattgtattaactgcacaaaaacattatgataaaaacaataaaagtaaaaaccacttactaacaattgtacaggcatttaaataattgctgtactgttttctttcctcaacagtacaaatcaaagtggaggaaaaagaagacgagactgaggaaagctcaagtaagtggtgatgggccacttgggatacatttcctatggaataccagtaaactcaaagaatttatcctcttgtggacttgagctaccatatgtaagcagaagtgtgtgtggataacttttcatggtctcacaggaggaatcaagttcagcaaacagaatccccactctagagtctatccagttggcactataagggccaagactgtgttcccttgattgcttgctgaaaaatcaacaagcaaaagacatgttaataggagaaaaggcatataatttcatagaacttgtattcattaaagccttaggatgaagacccaaagatagagaaaattgtccatttttatgcttaggttcaacaaagtgtggatagcagtgtagaaatatgattggacgaaaagggtataatctaatgtttacatagagtggggaaacacaacaaggcctgtctgcctagattcttcttggcctctctaagcatgcatttctttcttctgggtatggggcagggaccctctttggaatgagggtcttatgatctacactcaaacaaggtaggtcggatgatttcttgatgaccagtttttacacagacagggcagagggaatgttagagtagtatttttaggtttcatgcatttgagaagaatgtttattctgttgttattgggtagaatgttctgtatatgtctgctaggtctgtttgatctataatgttgttcatgactgctgtttccttattgattttctgtctagatgttctatccattatggaatgtaatgtagggtattgaagtttcctactataattatattgctgtatattttctctcttgagtttggttaatgtttatatttaggtgctctgatgttggatgcatatatacttataattgtgatatcttcctggtaaattgacccttttattactatttaatgcccttatttgttgcttatgacagttttatactaaaagcatattttgtccgatgtaagtatagccacccctgttcttttttagctaccatttgcatggcctatcattttccgttccttcactttcaccctatgtgtgtccttaaatctaaagtgaatcttttatagttagcatacagttgtttcttttctttggtttcttttttaattcattcagccactttatgtcttttgattgagaagttcaatccacttaaatttaaagttattattgatagagcaagactaacttttgccattttgttcattgttttctgtcttaaagctcttttgtcccttttttatctcatgttattctccttcatattttattgatttttattatagtgatatactttgattcctttctcttttcttttgtgtgtcttctatagaaattttattgtggttaccatgggactcatgttcaacatcttataattataaaagtcctattttaagtagaaaacaatttaacctcaattgcatactaaaactctacacttctactttccttgacacttaatattattgacatcttgagttacatatttttatattatgcatccattaacgtatttttatagttactgttaatacttttttacttttataatacaattaaaagttaccaatatactgtcattaaagtattatagtatcctgtatttgtctacatatttacctttaccagacagttttatattttcatgtgattttgtgttgctctttagtgtcctctcttttcaacttgaagaacttcctttagcattacttgtaagaaaagtctaggggtgattaacttaggttttgtttgtctgagagtctttatttctctgtcatttataaaggacaaacttgctgagcatagctttcttggttggcaggtttcttctttccaacacttttaaaatatcatcctactttcttctggcctgcataatttctgctaagaaatgatagtcttatgaaggtttccttgtacatgacaagttgcttttctgtttctttcaaaattctgtctttgtctttgacttctggcaatttaagtataatatgtattggtgtggatttatttgggttcacataatttagggtctgtgggcttcctgaatctgagggtccattttctttcccagatttgggaagattttggttattattttctttgaatagtctttctggccttttctttcttttattctccttcagaactcccatagtgtatatattggtctgcttgttgatccctcataaaactttcttgactttttcttattctttttatggttttgctcttctaactataatttcaaacatcctatttttcaatttggtaattctttcttttgcttgatcgagtctgctgttagacctctgtagtgaatttctgttactctattcttcagttattgtgttcagttattgtcttgtactcttcaatatttatctctggttatttttatatttttatttctgttgaaactcatactttgttcatgcatttttcttctgaatttgttgagcatctttatgagttatttttaatagtctgttaagtaattcatatatctccattatattagggctggtttctggagctttatcttctgttgtttggggtatgttttcctgtttctttatttttcttgattttgtttgtttgttttggtatccatatattagaaaaaacagattcctttcccagccttcaggagaaggattagccttgtacaggagaagagtttcaccaatgaggcaggccagagattcttgggcctctcaaacatttcctgtgtatgcatcgtctctggacttgtgtgtgtaaattctcaataagagggatttttcagttgactttttctttttaagaattcataatctcttgttccctccagtgtccttctgtcataacatgtgtcttctgaggaagcagcatgtcctgagttcttttttttgtttccagtagtccccaggcatcaacagtatgctgggtcctgtccatgccctgagactggtcattcccttaggcagcctcctgagaagtctgaacacagggtatatatttcagtcttttatttcccatttcaggggcaagtcaagggctggaattcttgccaactgtgtcatgctgaactgggggaaggggctctggtgaatgagtacaaactaattcaaaacttcacctttgttctccatggccctgggccatttagaatatgctgggtcctattagtgctctaggagacaagtgggacagaagccagtccagtcattttttagaaaagttggagtgttagatgcactatccaactgtttttctccccagagaggtgcagatttggtgtttatcatctggttattctgtgctaaattgggggagtggctatttgagtgaggcatactattcaaacggctatctttgctctcattggttcctaaccagaggtcttttcctgtcagtgctcagattctggcaagacagaaaccagtcctttgggaacctccagaaaaatcagaatgttgaacacatggttcagttgttttctcccctccccagggagagactgggagatgatggttttctcccagttgtatggtattgtgttagcagagagggattatggtgtgagggtgtgtcagatttttctaccagctacctagctgattttgtgttcatctagggttcaggcacctttcaactagtttccgaatttctcacgaagggagcttatctccacattgtagttgaacttttatgtccatggagggaaggcgggtccagggcttcctattttgtcatcttgttgatgtcatcccagtagtttagttttaatacaaaaaatactaaaattcagagtaccaagtagctgcttgggtttgtgagttattagtgggtaaattgtttcttgcctcctgtcaagtttttgtcctttctttaattagtgactaatgtggctaataaaagcagggtaaatattcagaatgccatgatggggttcaaataacatacatttgccacaatattaaacaaacagaaactcgttcttgatttggatgacagaatatatatacagttttccaagcccagttagaaaagttattatgggccgggtgcgatacctcacacctgtaatcccagcactttgggaggccaaggcaggtgaatcacttgaggccaggagttcacgaccagcctggccaacatggtgaaaccccatctctactaaaaatacaaaaaattagctgggtatgatggcgcacacctgtattctcaactactcaggaggctgagacaagagaatcgtttgaactctggagctggaggttgcagtgagccgagactgtgctattgtactccagcttgggtgatagaacaaaattgtgtctcaaaaaaaaaaaaaaagtgaagttattctgttttttactctctgctacctgacatttagtaatatatgtaatatttagatcttatacctgaaatatcaataaaaaagttttaacaagtggtaattaaagataattttgaaaaaataaaatgatgactcacacgtatgtgaaaagaacatatttaactaataaaacaacttgtgagatgctataatcagttcaaaggaacgtccaaagaatagatacatttatagataataaatattgaaatgattgtacaaatgaaggcaaagttgtttttgaaagggggcttgtctctcctttggaaagagttcatttggatgtctacagataaaaagtgttttgtattgctatatatggttatgtataattttcaaagttgtcatatagttctcataaaatcagaatcagataacacagaaaggtatgctgcagataattcatagttttccattgaaatataattttttctctggggtagcctctatttaagagagtaatgataactgtaatatttaattttttacagtagtttatgctaaatgttagaagttaggagcaatagaaatgaaactggaatagtaatgttatgttataaactttgtgaaggaaattttatcttaattatcttaatttatcttaattatctctctattctttacctggaagcatcctaaaaagttatgaacacatgaggcattcattgttgttgatgatgaaacaaaataatgctgtcattattctcaattttacattaaatttatgttacctatttctattcataagaaataaatgatcaagcaaatgtgtatactacttttttttttaaagaaaagaacaaaaatattgaggaaaaaggagaaaaatatttagaatcaagaatgaagaaaatttaaattgagaggaacctcaagggttgaatgaatttctccaaaattattctagtttgtagcacctctttaacgttcctcttctttgttctaagatagaagtagtaataaatatgaagtggttaatcactcaacaattatgtaatggaatggtaatctctaaacttggacttatttgaatggtcttagaggtcatggtatgatattaaccaccaagctatttagttactcaagtaaatgaagaccagaacttcttcaaaaacttattaaaatttgggaatccacattcacctatttgagtcggtgaaccacaatggaaatggaaatctagatacatttatttaaatgatgggctatgaaatatgtattccatgatgcatcccatcacgatgtggagaattgctagactgtgctgtcagatgtgtaataatagttattaaaaactaagaataagcttggtagtgggaggaagcactttctgacattactcattgaatcaagtgctatgtttaggtgaagaggaagaggaggtggaagataagctacctcgaagagagagcttgagaccaaagaggaaacggaccagagatgttatcaatgaggatgacccagaacctgaaccagaggatgaagaaacaaggaaggcaagagaaaaagagaggaggaggaggctaaagagaggagcgtaagttagttctgatattctttcaaaagttccaatgctgaagaagatcactcctttcagatactctttgaccttaaaattggtaattaaagctacttttagaaagagagccttaatctgatgatgctattttattctacttaattaaatgtattttaatggttaaaatagaattttaaaatgaatatatattaaaaatggaccatgagaaattctcttatgaaggatctgaattatcataggtcgttgacatattacagttaatttaaagattttaaaatttccccactaattgtatgcattgttatctaggttaagtagaaactcctaaatagtgagcaaacatcactttatcttacagagcaggggttggaaaattatggctaaatccagcccaagaggtaagaatggtttttacagcttcaaagggtcattaataaaaagcaacaaatatgggacagagttgtacatctcactcaaagcttaaaatattaactatttggccctttatagaaagaaagtgtgctagcccttgttacagaggatttgggttgtcattttctttttaatacaactcaatatcttttagttccaccaggaaaacattttagtaaacgctgactttgtgtagaataatgcattaaatgctgtttaggaaaaatccaagaaaatacttttcttctttttgctttttggaaatttgcagatagcaggcaggtaggaaaaatgtacgtgtaaaacacctctaattaaagagaaaacctagaccccttggaaagaatgcaagagaacagccaacctgttccacaactcacaggtaatagggccatgcgagtcgccatcaggtggtggaatctcctccaaacactcctaggactttgaagcatgaggaactttctaagatgtcctcccaagatgacacacttctatactcaatagctctaactattgtgttattccttataaatgattgtcattaaaaacaactgaatgaaaaatttgtcaagtagagaagcttagcattaacaaaaaatggtttcttttagaataagaataacaccatctacttcatgtctaagttttcctcctcctcttccccagcttttcctttctcccttttgaataccaagacaaaacttgcttttaaattttgactctagtattttttatttatatctgcttttaaagtttctttatgctttattcctttcaaaaataaaatgcaacacattttatgtcccatgtattactatgattgttagttccattattatgtagtaatagttcctatttagcaaagcttatgctttccaacagtggtatttcattgagaaaacatctccaattgatgtatgcatgatataggttgtgttccaaaatttgcttttcctctctatttatgccgcaaaaaaatccttttaaaaagatgagttggacaggaattcctctgctctcttcgtctgctgatggccctcatggcaactgctcaacttctaggaaatggggccatgtgaagcaactggatcctgtggctatgacagtgtctcttcctagctggcctcactttcattttgatcttgagaatcaagatcccttacctcccactcttccacataacccaactctctccataggttttgcaaattgtatttttgctgcgacaatttgtgcatctattataaatagtatcagaaattagttgtgattattgatagttctgttctctattttagagtctattttctattgttcattttgaagataaacatcttttttttaaaagaaaatcttagataatatttttgagaaagattagtagccaaatcagggcacatttatgtaggttaattaattcagggtattttttatttaactattcaagtaatgcctcagggaatttcccttgcattgacacaacatttgaaaccaactaaaaccaaggttgtaatgctaactatctttggaggcagttaaaaaaacactgccttgttagacattttggagtatttccagtaatattacaggcttttcctgacccagttttaagtggataagtaatatattcatagcagtgagaaattcagcatattatgccttcttcttcctaacaactgttgtttaaatatatcaaacttaagatagaaaaccattcttgcacagattagcctgaaaatttagatgaggcatgcctatgccttttaatatgattagccctttctttgagtgattctagaaaagcaggtttcctgtaatgctgattagaaaagtattttaattaccttcatatttgagggtaacttatgtgtcaacaactgtaccctgtaacacagcctgatcctcctggtgaaataaacaattaacaacagagacttaaaagatataccaatctggggtcatttagtacaggaataaacgtctttccataccataataatctcagaggtagttgttatattttagtgtactttgagcactgggtttatgatgataaccctgagcaatccagaaaagttttgtatacatatgttcattcaataagttatttacccagctctacttttgtgcaacctaatttgcttatatctttgggatacttggatatgaacatgtaattgcccacaatcttgcaatcttcaaaagtccataatatagtaagggataggccacttagatacaaattattatgacataagaaagtatatgtgtcccagagaaatacaaacaaagtagcttggagtctcagagaagtgaaaactgttctcacagggatagttagaaaagggattcttaaagacatttcatatgatttttaaaggacttgaaatttggacaagctgaacttataaactatttaattagtattagaattgtttctattaaagggtctctgaaagttggcctgtaggtttagttacctggcaaatccacacatcaaatagataattctttcattctttggtgatgttggattagagatgctgttttacatgtgattcttaatggaagttcagtagtgtaaagctttaaggtaattatatgtaaatatcatgaattattttgaaatggttggcaagttaaaggcttaacatatcaagcaattaaattattaatcataaagattttttctaattgactttattactgataatttcttgccatctgttttattttatttttgctagtttctgaaaatatttcaataaaactgctatctatgtaatttaaagttattcctatgtttgcatggaaacaattgtgatcattttaattaaaacacatctttacctcctaagacaaactaacccacatatcattctaattggcaaattaaaaaaaaaaattgtggatatagatagagtaaaaaaaatcctgaaatattttatgccatggctacacagcatcataggcttttatatgataaacaccaaataatgaaaatagaaacaacccaatggctatcagagatgtatcttagaagagtgtacttccctggttctcttgaaccaaaatgattattctaagcaaaatgtttgaattgtccaaaaaacaaactgtcaataggaagtgttattttaaagggttaatatgaatttttgtttcagtaatcatagcatgattaaaaactataaattggtggcaaataaaggagattgaaagtcattttgtaaggtgaactataaaactgtggatatgtccttttcctcaactagaactttaaaaagcagcttttgccttatttctactgtatctagtcataaattatttttctgagtaatactgaattggattacaatttttgttattggtcaatatctagtgaggggagaaacttcaacagttaattgaacagagagaatttaataagtgaattgttaggaggtataaatgttaattagactgcagaaaaggtaaaaagagaacactaaagtatcatagtgacggtaactactggaagcagctaccatcccaagggctggaggaacaatggaaagggttgaaacgaaaacactgtagcgtagaggaaagaccctaggagctaaaactcaggcctctgcagaggggctgatgctctgtggtgctggtttctgtgggagaggtgatgaagctggttctgctagtgttggtaatattggtgataaggattcacttgcagtatggcaaggacgctcagctccaggagtgaagaagagatgctaaggaggaagtgtcaccccacaaagcaaatatgaagcagagaggaagccacaggaaagacggagaccctcttcagtatcccctattgtcagagtatatattgacccagctaacaaagcagaaatatgactcacaaaataccagccccagcaccacaatattaaagtgtaggagggtgtgtttgaagttgggacaatagcttaaaaactgaaataatctattaccaaaaagctgatctctacaatgtggtattgcatgcctcgatttaaaattatgttgctcttgtttagattttgtttcctttgagttctggaccgcatagtgttttcgtaatactaggaacacagaaaagaaaagctacatctcatgctcagtaggaactaaattcctttgaagatctcttcaaaggattcacttccaccaaatatatttcaaggtgaattttaccaaatgaagttataagtttaattaacagataacattaagttacctttgagaaatagatttttatttttcccgatttcaatttttctttctttctttctcttgagacagggctaacaaaatttttaagggcaaagacatcttcacccctaatttattatccttattgagaaataaaatatttaaacgaaatgtagaattgagggaaggtattcaagggaacaaagaagagagggaaatatcttgatatatctgtaattattctttccacagattttctggttcagagagtttgaggctctagacataaaagaattgcttagggcgggtgcggtggctcacacctgtaatcccagcacattgggaggccggggagggtggatcacctgaggtcagaagttcaagaccagcctggccaacgtggtgaaactctgtctctaataaaaatacaaaaattagccgggcaagatggcagatgcctgtaatcccagctactggggagcctgaggcaggagaattgcttgaacctgagaggtggaggttgcagtgagccgagattgtcccactgcactccagcctgggcaacagaacgagactctgtctcaaaaaaaaaaaaaaaaaaaaaaaagcccggcttatgcctgtaatcccagcactttgggaggccgaggtgggcagatcacctgaggtcaggagttcgagaccagcctggccaagatggtgaaacccccatctctattaaaaatataaaaattagctgggctaggtggtgggcgcctgtaatcccagctactcgggaggctgaggtagattgcttgaacctgggaggcagaggttgcagtgagccaagatcgcaccattgcactacagcctgggtgacaagagcaaaactccatctcaaaaaaaaaaaaagaaaagaaaagaaaaaaacagaatggcttagattcagattcaggaaggcaaacactactgcttaaagttataatagttccagtaatcctgcatcagtgttcagatttgagttctcatgcttatgggtcctaatgttgactgcatatggttacatttaaaaaaaatgagctaaatatctgatacctgccttccttaagttccaaagtcaagcaaagcttaactttattaaggtgtttcttttttacttttaaagagaagaagaagaaattgatgaagaggaattggaaagattgaaggcagagttagatgagaaaagacaaataattgctactgtcaaatgcaaaccatggaagatggagaagaaaattgaagttctcaagtatggtgccactttttataagtagaaacactttccctgatattgattttctaaatcctctgaatattccatatatatatatatatatatatatatatatacacacacacacacacatacacacacacacacacacatacactgtatatatagtatatgtaatactatatatatcatttatatatgactcattatatataatggtcacagtcataaacatgtatatcatatttctgcatatatacccaaatatatgtatatttacatatatctgtttcttatcactagagagactgggctaatgattataaattggaagcaactctgagaaattatttagagtcttttaaattctttggtcatctttaatcatttgttccttaaactggagtttccttagcttaatacatttgttaccatctctttgaaagagataatatatttgaattttacaagtttgtgtggattgtgcactcttgtttctcttcagggccctggtctcaaatgaacttttcatgtgacagcttacattaaagcacagagaagatgctaggccaacagaatagtaaataggattccaattaaaggttatgctaatagctattccccgaacatgtcagtgacccaatttcagtcttatgttgatgctaatgtggacgcgaacgcagtcagagcacacagatttataaactcttcatatgaaaagtcaaatgattatcctattctgggggatgggaagattcacccctgaggatcacactatatttccctgccctggtggttgggagaggaggaaagggcagggaaaagggaaactgtttgtgataacagccatgtttgcatctcctagttttgccaaagattgcattcttccataaatcatttttataaatagtagtaagttttaaaaactatcccttcacaagcctatttaactagtaatgctgtaaaaatgatagtatagtattattgtctctgatgatgaaaacaagaactgaaatagctatcaggataattcacttctagtcttggttctgcaagagcttgtgtgctatttaaaggtatcgcttaatctcctgaagccttagttacctcatatccaaaataaagaaagatattctatatcttctctgtgcgcttgaagcgtagccatcatttatagtatttttgttttgttttgtagagtaaggttttccaagttctaaacaatggttttcccagaaaacttttgcaacaccacaaaattgcagtctgggaactccctttgcatgctcatgtacacatccatcataaatgaaggcaaaggcaagcagcatcctacgttccacagagctacaaattttgtgtatgcatgctcatgtgtctgtacattaaaataattttcatttagcgaagtgataatgatgctaaattataggttttaaaaatattcttacctggcaaaatagaagtttggcaaccctatgtgggcctctcaaatatatttgaaatattaatgacccataaagtccccaaacttgggaacttcagataactatatatagaaagtttaaaattggagcaatattgtgaacttccaaaatatatgattgaataaaaattccaaggactacctttcctttccaactgcatggaggtgtagaaatacccccctggtctttgcccgtatctctcgtgcaggatcgtggaggagacagcagcttcagatttgagttaggatctcagatcttccatttaatagctgtgcacatttgatcgagttgtgtagtctctctacacaactcaggttccttatgaaattgtaccttattgacagagtttttggaattataaaatgagataatttatgtaaaacatgttgccagaacttggcacatagctgggaaacctaagttgtagttattacttcatctcagaacagacttgatgcccaattcctgaagggtgacaagagagatggagagaatttgggacctggcaagtctaggtgggagcagacctagtcacaatcagaccccagaagccttgtgggatggtgacacattggtaccagtttggataaacaataagattttgaggatgcaacagaaggaagtaaggcatttgacaatttagcaaaatccaggaccagaccgttctcagatcttctaaaacatagccatagttctgtggcagatttcaaggtctcaggccttggtctggagtccaagagttaagcaaattttagcaatggggagagataggcattagcattggaaagaaggacaatacgagcccttagtacgaaagcagacactgacaataaggagaccgcacctgactctaatctagacataggtttttttatttggcccacatgtgttttgtttctttttcttttattttttttaaccgtggcaatatatacaatacaaaattcaccattttaaccatgaaatcgattttctttatcataatttttttcaatatttttaaaaatttaaattactttttttttctcgagacagggtcttaactctgttgcccatgctggagtgcagtggtgctatcttagctcactgcagcctcaatctcctgggagcaagggatccttctgcctcagtctaccacgtacctgggactatatgtgcacactaccatgtttggctaattttttctttttgtgtagggatggggtcttactatgtcgcccaggctgatctcgaactcctggcctcaagccatcttcctacctcagcctcccaaagtgctgagattataggcatgagccactgcacccagcctcaatcttttaaaagtgggagtaaaatattcagatgttcagcttttcatgaacaagtggaagatttggtcctacattcttccatcacagtaacagctaggactaagcacctggcctctattaatggggcattcctttttcaatttgcaccattctcaaacaatccatattacttgtttatgctgcttggctggaccctgtagacattcagatttgctgcctcctaccagtgcagctggggaacaagctaggcatgttaccaagacggtgattcagatcttcaaagccaaagtcagctcacagaatggaagcacaaatttagtcccagaaaagaaacaactgtggcttctcacatgtcagcaaggctcacagtctggtgatgattttccatggccagaagtggtttctgccttgtggccgcacctatgggttccagctggtgccatggccggggccagcctaattcttttggtttcagtctccgtgatgaagttgttggtacttaagtgcctgacttatctctctttgaatgctctattgagctttttttgaatgttctattgagcttctccccaccagattccaactacattattagaacaagtggtcagtacttcacagaacgtgcaggtaaatgtttctctaccccaatgccaccaatgcttgggagtgaggcagctttccctctaccctttatttctttcagagacatctaactttgagagcgtgtttctaaggattatgttattaatattccccaaattagcctgcatcatcgctcctggctaagtctgtgaaacccaagatactaagctcagtgtaactgaaagagatgttttgatcacagctttgaatctgtgcctgggttcgaagccttcttgttctggacttggagaaagttttgaaacttctaaaagatattttagacagtgtcagggttttaagatatattttagagtaagcctcaggaatggcaacttatggttctgagggtgttatgggagactcagagatagttcccacatttttaaagagcatctaccattaggaacccgagcacactcagggcttaggatcaaaagatggttaatataagtggttgctacataggcaggcagctctaggaattggttgtgaatccatattaatcctcaaacatggctcaggagctagagttcagcattttcaagatagcagaattggctctatacagctgaaaggaagccatctccttttcatcatcactgtggaaattgtgattttcattctatgttttattgtatatcaatacaatttcacacattcctgtagccttaaacctactgaatgataatctcttggtggaaaggcaggtgtgtctggcccagaccagaaatgtatatttttattttttgatctaaaaattactgatatatagtcagaatgaaagctgctgttttcaattctgagagacagaaagctccactaaacagaatactcagctctacagatgatttatacaatgaggaagagtgtgtgtagggagttggaggggggtaagggaaacagtgtcatattttccaattatttgaaagtcaatttctatattttattaatcacatcatttaaaaatatccattaatgagaatactaagtataatctgtttttaagctgttcatgggtttaattcagaggctgtatgactagatctttcctacctataagaggtcgcagcacttacctgatagcagccaccacaagtgaaataaaatacccaggtagaaagtaacaggtctacttattacttgtcttgaaacctaagacttttaactgtatcagaacattatatgtggtagattgaaagtgctcatgactaaacctaaataagcaaccaccttattttgttacagtagaataggttttagactgaaaattgagacttggactttgagctaagtgcttcctataacttctctttgaacctccatttattcatttataaaacagataaattggattgtggaccatggtcttcaaactgctatcctccaaagtcaagcagtttggtgaaatcaaatcagggcaaaggaggcagaggtcgcagggagagctactgggccacaatgccggcttcaaaaacagacctatggtttctctcttctacacagtgtacttccatataaagcattgattggaagaaagaatgcttctgtggctattaaaataaaaaacagttttaaaaacccacttagctggatatttaaagaaacttattttggagaagggacagttctaacatttcatgagtctacaaattaggatacagaaacactccaagtatacttttgcagggaattggcttttggatagacaccattttaaaatgatttattttgataacaaaaatgtttatttagctattatactgactactttaatttctgagctttgtagtaccctgacctattgtttctgggagttgtccattggctggctaggcctggtgatttattaatgagacacccagtaaagccaggaaagttatcctcagatttcattcacacttaaacaggtgcttcaaactgtcagctggccattaaggtaacattcctccttactcaatctcccttgatcttttcacacttcttttcatttgtttgtttgttttttattttgttttattttttagttgggagaatgaatacatttttaggaaagtgaaaacagaccatggttgatttcctctaatggagctgttgggaaaactttgggaaaactatttatttggcttccattctcaccctttctctcctgttttcttgtagcttaagattttcacaggcaagaatcatggtttatactttagtttttctctcatctgtcattgtgaaggaataaaagatgctatacaagaggacatttaagcgtgtgaacacacccaccaacataccctcaaaccattctggattattttcttttttaaattttatatttccataagtttttggggaacaggtggtatttggttaaatgagtaagttcttggggaacaggtggtatttggttacatgagtaagttcttctgtgatgatttattagattttggtgcacccatcacctgagcagtatacactgaacccaatttgtagtcttttatccctcatcccaatcccaccctttccccagagtccccaaagaccactgtatcattcttatgcatttccgtcctcatagcttagcttccacttacgaatgagaacatatgatatttggttttccattcctgaattacttcacttagaataatagtctccagttgtatccaggttgctgtgaatgccaatatttctttctttttctttttctttctttcttttttttttttttgagatgggatcttgctctgtcacccaggctgtagtgcagtggcgtgatctcggctcactgcaacctttacctgccaggttcaagcgattttcctgcctcagcctcctgagtagctgggattacaggcatgtgccacaacacccagctaatttttgtatttttagtagagatggggttttgccatgttggccaggctggtcttgaactcctgacttcgggtgatctgcccaccttggcctcccaaagtgctgggattacaggcgtaagccaccatgccaggcccaaatgccaatatttcactcctttttatggctgagtagtattccatcatgtatatataccacaatttctttatccattcattgactgatggacatttggtctggattcatatttctgcaattgtgaattctgctgctataaacatgcatgtgtaagtatcctttttgtttaatgacttcttttcctctgggtagataccctgtagtgggattgctgggtcaaatggtagttctacttttagttctttaaggaatctccaccctgttttccatattggttgtactagtttacattcccaccagcagtgtagaagtgttcccttttcaccacatccatgccaacatctattattttttgatgttttgattatggccattcttgcaggtgtaaggtggtattacattgtggttttgatttccattttcctgatcattagtgatgttgagcattttttcataagttttttggtcgtttgtatatcttcttttgaaaattgtctattcatgaccttagcccactttttgataggactgtttgtatttttcttgctaatttgtttgagttctttgtagattctggatattagtctttgtcagatgtagagattgtgaagaccttctccctctctgtgggttgtctgtttactctgctgactgttccctttgctgtgcagaagctctttagtttaattaagtcccacttatttatctttgtttttgttgcatttgctttggggttcttggtcatgaagtctttgcctaagccaatgtctagaaggttttttctgatgttatcttccagaatttttatagtttcaagtcttagatttaagtccttgatccattttgagttgatttttgtataaggtgagagatgaagatccagttttattctcctgcatgtggctagccaattatcccagcaacatttgttgaatgaatagggtgtcttttccccacattatgtttttgtttgctttgtcaaagatcagttggctgtaagtatttggatttatttctgggttctctattctattccattggtctatgtgcctatttttataccagtagcctgctgttttggtgaccatagccttatagtatagtttgaaggaaggtaattggatgcttccagatttgttctttttgcttagtcttgatttggctatgtggcctcttttttggctccatatgaattttagaattttttttctagttctatgaagaatgatggtggtattttgatgagaattgcattgaatttgtagattactttaggtagtatggtcattttcacaatagtgattctacccaaccacattagcatggatgtatttccatttgtttgtgtcatctgtgatttatttcagccatgttttgtagttttccttgtagaagtatttcacctccttggttaggtataatcccaagtacttttttttttttcctgtggctattgtaaaaggggttgaatagttgatttgattctcagcttggtcactgttggtaaacagcagagctactgatttgtgtacattaattttgtatcctgaaactttgctgaattcatttattagttccaggagctttttggaggagtcttcagggttttctgggtatatgatcacatcatcagcaaacagtgacagtttcacctctttaccaatctggatgccctttatttctttctcgtgtctgattggtctggctagtactatgttgaatagtagtgagagtgggcatcctcgtcttgttccagttctcagagggaatgctttcaactattccctgttcagtattatgttggctgtatgtttgtcatagatggcttttattacattgaggtacgtcccttgtatgccgattttgctgagggttttaatcaaaatgggatgctggtttttgtcaaatgctttttctgtgtctatttttttttcgggggggtgggtgtttaagagcagaaagtttaataggcaaaagaaagaagagaaaaccacccccatgcagagggagggggatcctctcttgctgcatctattgagatgatcatgtcatttctgttttaattctgtttatgtgttgtgtcacatttatttacaagtgtatgtcaaactatccctgcatccatggtatgaaattcacttgatcatagtggattatctttttgatatggtgttggatttggttagctagtattttgttaaggatttttgcatctatgttcatcagggatattggtctgtggttttctttttttgttttgttctttcctggttttggtattagggtgatactggtttcatagaatgatttagggagtactccctctttctctttcttgtggaatagtgtcaataggattgaatgtctgatagaattcagctgtgaatctgtctggtcctggacttttttttgttggtaatttttaaattactatttcaatttcattgcttgttattggtctgttcagggtttctaattctgattctagctaaatcctcctgatttaagctaggaggattgtatctttgcaggaatttattcatctcttctaggttttctagtttatgtgcataaaggtgttcatagtagccttgagtgatcttttgtatttctgtggtgttggctgtaatatctcctatttcatgtctaatagagcttatttggatcttctctcttctttgcttcattaatcttgctaatcgtctatcaattttatttatcttttcgaagaaccagctttttgttcaatttatcttttgtatttttgttgttgtttcaatttcatttagttctgctctgatctttgttatttcttttcttctactatttgggtttggtttgtttttctagttccttgaggtgttaccttaggttgtctatttgtgctctttcagactttttggtgtaggcatttaatgctatgaacttttagcaccacctttgatgtatcccagcagttttgataggttgtgtcactattattgttcagttcaaagaattttttcatttccatcttgatttcattgttgacccaacaatcattcaggagcatgtactttaatttccatgtatttgcatggattggaggatttcttttgatttccaattttattccactgtggtctaagagagtacttgatacaatttcagttttcttaaatttattgaaacttgttttctggcctgtcatatggtttatcttggagaaagttccatgcactgatgaatggaatgtatactctgtggttgttgggtagaatattctgtaaatatctgttgggtccatttgttctaggtatagttttaatccattgtttctttgttgactttctgtcttgatgacctgtctagtgctgtcagtggagtattgaagtcccccactattattgtgttgctgtctatctcatttctgaggtctagtagtaattgttttataaatttgggagctccagtgttaggtgcatatttatttaggattatgttttcctgttgaacaaagccttttatcatgatttagtgtccctctttgtattttttaactgctgttgctttaaagtttgttttgtctgatataagaatagctactcctggtcacttttggtgtccatttgcatggaatgtaattttccacccttttacctcaactttatgtgagtccttatgtgttagttgagtctcttgaagacagcagatacttagttggtgaatactttttttttaaattatactttacattctggggtacatgtgtggaatgtgcaggtttgttacataggtatacacatgccatggtggtttgctgcacctgtcaacccgtcatccacattgggtatttctcctaatgctgtccctcccttagctccgcatccccaaacaggccacagtgtgtgtacatgtgttctcattgttcaactcccacttatgagtgagaacatgtggtgtttagttttctgttcttgtgttagtttgctgagaatgatggttttcagcttcatccgtgtccctgcaaaagacattaactcatccttttttatggctgcatagtattccatggtgtatatgtgccacattttctttatctagtctatcattgatgggcatttgggttggttccaagtctttgctattatgaatagtgctgcagtaaacatacgtgtgcatgtgtctttacagtaaaatgatttataatcctttgggtatatacccagtaatgggatggctgggtcaaatggtatttctagtttcagatccttgaggaattgccacactgtcttccacaatggttgaactgctttagactcccaccaacagtgtaaaagcattcctatttctccacatcctctccagcacctgttgtttcctgactttttaatgatcaccattctaactggcgtgagatggtatctcattgtggttttgatttgcatttctctaataaccagtgatgatgagcctttttttcatatgttggttggctgaataaatgtcttcttttgagaaatgtctgttcatgtcctttgcccactttttgatggggttgtttgatatttcttgtaaatttgtttaagttctttgtagattctggatattagccctttgtcagatggatagattgcaaatattttctcccattctgtagattgcctgtccaatctgataatagtttcttttcctgtgcagaagctcttcagtgtaattagatcccatttgtaaattttggcttttgttgccattgcttttggtgttttagtcatgaagtctttgcccatgcctatgtcctgaatggtattgcctaggttttcttctagggtttttacggttttaggttttaggtttaagtctttaatacatcttgagttaatttttgtataaggtgtaaggaaggaatccagtttcagctttctgcatatggctagccagttttcccaacaccatttattgaatagggaatcctttccccattgtttgtttttgtcaggtttgtcaaagatcagatggttgtagatgtatggcgttatttctgaggcctctgttctgttccattggcctatatatctgttttggtaccagtaccatgctgtttttgctactgtagccttgtagtataagtttgaatcaggtagtgtgatgcctccagctttgttctttatgcttaggattgtcttggctatgcaggatattttttggttccatatgaaatgtaaagtagtttttttcaagtctgtgaagaaagtcaatggtagtttgatggggatagcattgaacctacaaattactttgggcagtatagccattttcacgatattgattcttcctatccatgaacatggaatgtttttccatgtttgtgtcctctcttatttccttgagcagtggtttgtagttctccttgaagaggtccttcacatcccttgtaagttagattcctaggtattttattcactttgtagcaattgtgaatgggagttcactcatgatttggctctctgtttatctgtttttgatgtataggaatacttgtgatttttgtacattgattttgtatcctgagactttgttgaagttgctaatcagcttaaggagattttgggctgagacaatggggttttctaaatatataatcatgtcatctgcaaacagagacaatgtgacttcctcttttcctaactgaataccctttattcctttctcttgcctgattgccctggccagaacttccaatactatgttgaataggagtggtgagagaagacatccttgtcttatgctggttttcaaagggaatgcttatgcttccagtttttgcccattcagtatgatattggctgtggatttgtcataaatagctcttattattttgagatacattccttcaatacctagtttattgagagtttttagcatgaagggctgttgaattttgttgaaggccttttctgcatctattgagataatcatgtggtttttgtgattggttctgtttatgtgatggattacatttattgattcgcatatgttgaaccagccttgcatccccaggatgaagccagcttgatcatgttggataagctttttgatatgctactggattcagtttgccagtattttattgaagatctttgcattgatgttcatcagggatattggcctgaaattttctttttttgttgtgtctctgccaggttttgctattaggatgatgctggcctcataaaataagttaaggaggattccctctttttatattgtttggaatagtttcagaaggaatgataccagatccttttagtacttctggtggaattcatctgtgaatttgtctggtcctggactttttggttggtaggctattaattgctgcctcaatttcagaacttgttattggtctagtcagggattcaacttcttcctggttcagttttaggagggtgtatgtggctagaaacttatccatttcttctagattttctagtttatttgcatagaggtatttatagtattctctgatggtagtttgtatttctgtgggatcggcggtgatataccctttatcattttttattgcatctacttgatttttctctcttttcttctttattagtctggctagttgttgatctttcaaaaaagccagctcctggattcattgattttttttttttttgaagggctttttgtatctctgtctccttcagttctgctctgctcttagttacttcttgccttctgttagcttttaaatttttttgctcttgcttctctagttcttttaattgtgattttagggtgtcgattttagatctttctttctttctcttgtgggcttttagtgctataaatttccctcaacatactgctttcaatgtgtcccagagattctggtacattgtttctttgttctcattggcttcaaagaacatctttatttgtgccttaatttcattatttacccagtagtcatttaggaacaggttgttcagtttcgatgtagttgtgaagttttgagtgagtttcttaatcctgagttctaatttgattgcactgtggtctgagagactgttatgatttccattcttttgcatttgctgaggagtgttttacttccaattacgtggtcaattttagaataagtgcgatgtggtgctgagaagagtgtatattctgtttatttcgggtggagagttctttagatatccattaggtctgcttggcccagagctaagtttaagtcctggatatccttgttaattttctgtctcgttgatctgtctaatattgacagtggggtgttaaagtctcatgctattattgtgtgagggtctaagcctctttgtaggtctctaaggacttgctttatgaatctgggtgctcctgtattgggtgcatatatatttaggatagttagctcttcttgttgcattgatccctttaccattatgtaatgctcttctttgtctttttttgatgtttgttggtttaaagtctgttttgtcggagactaggattggaacctctgcttttttttgctgtccatttgcttggtaaatattcctccatccctttattttgagcctatgtgtgtctttgcacgtcagatgggtctcctgaatacagcacaccaatgggtcttgactcttaatccaatttgccagtctgtgtcttttaattggggcatttggcccatttacatttaaggttaatattgttatgtgtgatttgatcctgccattatgatgctggatggttattttgctcattagttgatgcgatttcttcatagcgttgatggtctttacaatttagtatgtttttgcagcggctggtactagttgttcctttccatgtttagtgcttccttcatgagctcttgtaaggcaggcctggtggtgacaaaatctctcagcatttccttgtctgtaaaggattttatttctccttcacttatgaagcttagtttggctggatatgaaattctgggttgaaaattattttctttaagaatgttgaatattggcactgtcttctggcttgtagggtttctgcagagagatctactgttagtctgatgggcttccctttgtgggtaacccaacctttctctctggctgcccttaatattttttctttcatttcaaccttggtaaatctgatgattacatgtattggggttgctcttcttgagcagtatctttgtggtgttctctgtatttcctgaatttgaatgttggcttgccttgctagcttggggaagttctcctggataatatcctgaagaatgttttccaacttggttccattctccccatcactttcaggtacaccaatcaaacatagatttggtcttttcacatgatcccatatttcctggaggttttgttcatttcttttcactgttttttatctaatcttgtcttcttgctttatatcattgaattgatctccaatctctgatagcctttcttctgcttgatcgattcggctattcatactcgtgtatgtttcatgaagttctcgtgctgtgtttttcagctccatcaggtcatttatgtcctctaaactggttatttcagttagcaatttgtctaaccttttttcaaggttcttagcttcttttcattgggttagaacatggtcctttagctcggaggagtttgttattacccaccttctaaagcctacttctgtcaattcgtcaaactcattctccatccagttttgttcgcttgctggcaaggagttgtgatcctttggaggagaagaggcattctggtttttggaatgttcagccttttcgcactggtttctccccatcttcgtggatttatctacctttggtctttgaagttggtgaccttcggctggggtctctgagtggtcctttttgttgatgttgatactattcctttctgtttgttagttttccttctaaccatcaggcccctctgctgcaggtctgctggagtttgctggaggtccactccagaccctgttcacttgggtatcaccggcagaggctgcagaacagcaaagattgctacctgttccttcctctgaaagctttgtcccagagggacatccaccagataccagccagagctctcctgtatgaggtgtctgtcagcccctactgggaggtgtttcccagtcagtatacctgggggtgagggactcacttgaggagtcactgtgtcccttatcagagctggaacccagtgttgggaaatctgctgctctcttcagagctgccacacagggctgtttaagtctgctgaggttgcacccacaaactccccttcccccaggtgctctgtcccaggaaggtgggggttttacctatgagtccctgactggggctgctggctttttttcagagatgccctggccacagaggagggaatctagagaggcagtttgggtgcagtgtccttactgagctgtggtgagcttcgtccagtttgaacttcctggcaactttgtgtacactgtgagggtaaaaccccctactcaagcctcagcaatggcagacgtccctccccccaccaagctcgagcatgccagatcgagctcagattgctgtgctggcagcgagaatttcaagccagtggatcttagcttgctgggctccgtgggagtgggacccactgagccagaccacttggctccctggcttcagccccctttccaggggcgtgaatggttctgtctcactgacattccaggcaccactggggtatgaaaaaacaactcctgcggctagctctgtgtctgcccaaacggcagcccagttttgtgttggaaacccagcaccagggccctggtggcgtgggaactggagggaatctcctggtctgcaggttgtgaagaccatgggaaaagtgcagtatctgggccggtgtatgtggtacagtccatagtggcttcccttggctaggagagggagttccctgatcccttgcacttcctgggtgaggcaacgccccaccctactttggcttgccctccttgggctgcatccactgtccaaccagtcccaatgaaatgaactgggtacctcagttggaaatgcagaaatcacccaccttctgcatcgatcttgctgagagctgcagactggagctgttcttgttttgccatcttgccagcaaatcggtgaattgttatgtattctgcaattctatatcttttaagtggagcatttaggccatctgcattcaatgttagtattgagatgtgaggtactattctattcatcatactatctgttgcctgaataccttggttttttatttatttacttatttattgtatttttgttttaatgggtcttgtgagactcatgatttagagattctgttttgatgtgtttccatggttcgtttcaatatttagagctcctttcagcagttcttatagtgctggcttggtagtggcaaattctcttggcctttgtctgaaaaagactgtatctttccttcatttatgaagcttaggatacaaaactgttggctgataattgttttgtttaaggaggataaaaataggaccccagtcccctctagcctgtagggtttctgctgagaaatctgctgttactctgatagattttcctttataggctacctggtgcttttgcctcacagctcttaagatttttccctctgtcttgactttagataacctgataactataggtttaggcaatgatctttttgcaatgaatttcccaggtgttcgttgaacttcttgtatttggatgtctacatctccagcaaggctgaggaagttttcctctattattcccccaaatatgttttccaaacttagatttctcttcttccttagggactccacttattcttaggtttggtcatttaacataatcccaaacttcttggaggctttattcattttttaaaattcttttactttccagtacattttgcatttctctgtgttctttacttcctgaagtagtgattgttttatatttatgctatctatttcactgaagatttctcccctcatatcttgtatcatatttttttatttccttaagttggacttcacctttttctggtgcctccttgattagcttactactcgaccttctgaatttttttttctggcaattcagggatttcatattggtttggatccattgctggtgagctattgtgattttttgatgatgttaaagaacattattttgtcatattaccagaactgtgtttctggctccttcttatttgggtaggctatttcagaggaaagatctgaagctcaaggctgctgttcagattcttttgtcccatggggtgttcccttgatgtagtactctcccccttttcttaggaatgtggcttcctgagagccaaactgtagtgattgttatttgtcttttggatctagccacccagtggagctactggtctctgggctggcactgggggatgtctgcacagagtcctgtgatgtgaaccatctttaggtctctcagctgtggataccagcatctggtccagtggaggtggcagaggagtaaaacagactctgtgaggtgccttagttgtagttgtttaatgcactagttttgtgctagttggcctcctgccaggaggtggcgctttcaagagtacgtcagctgtggtagtataggggaggatcaggtggtgggtgggggccctagaactcccaagaaaatatgaactttgtctttagctaccagggtgggtagggaaggaccatcaggtgggagcagggttaggtacgaatgacctcagactctccttgtgtggggcttgctgtggctgctgtggggataggggtgtggttctcaggtcaatggagttatgttcccaggaggattatggctgcctctgctgtgtcatgcaggttgtcaggaaagtggagaaagctgatagcctcacccagctcccatgcaacccaaaaggctggtctcattcccactgtgccccctccaacagcactgagattgttttcaggcagtgggcaagtagggctgagaacttgccccaggttaccagcctcctggttgagaaagcaagcggggcttttgtgccacctccctgcctgtcaccggattcacatcctcccccaagttctggccaggaaacttcacatttggttggaatcgttacagagttcagctggaggtttccttctccctgtggtcttttcccagttcctctggcagccctcctcaaggactcctgtgagacaagtcagaaattgcttctctggggacccggagaacccacatggcttttcctgtggcttcttctacccttgtgtttcactcagctctctaaattgtctcagctccaggtaaggtcaaatctttctcttgtgatctggacctttaggttccccagtgagtgtgtatattcggggcaggggatgatctccctttcccacttttgcagtttgggcactcacagtatttgggctgtctcccaagtcctgcaggagcaacctgtttccttcaaatggtctgtggattctcttgactttcccagtatatttctgcagcagttcttggaacaaaagttcacaatgcaagtctccacattctattctatccatccaagtgggggctgcaatttagtcctgactcctatctgccattttttcctagcagttcattctggattatttttaaccaataactcaaccaaagcacaggccttcagttcttgtactttacaggtatcttgagtatagcaatttttcatctgcagaatggagagtatataggcaattaatgcatctagattttgtccatcaaaaggtaacattgacatcccatttttctgctattttataagttcataccaggtgtcaagcattatgctgtgggcaagtttcttagtctctacatccttgagtctccttactatgaatggagataaaagtactactgcataaagttattgagataattaaataagctcatagatacaagcatgtaacatggtacctagcataataattttctttatccctcttaaccctccttcaaggtaggttttactattttgactttacatataaggaaactgaaactctgagaggataaataattgtcagacaattaataagtgatagatccacaatttaagcttgttgtgtggaaacttaccttggtatgatggaggtctctaagtacactaccaagcaagctctcccagaagtcacaaacctgaagttcacataccaaattaaaatgctcaaatcacatggcttagtaagcttatttaaagcacagtgagaagtaaggggaaagagatgggttatggtaagacatgggataaagtagcaatatcgtgagatcatgggcaacaggaccacacttctgtatcctgtgttctgcagtgttcgtgtgccctgtctctctcatcctgctgatagtgtggctaaggggactgaggtcccaatgggggccacataataaagattacttgggccaatgataggtacaagctccattggaatgaatgacacaggacaagtacgcctgatcatagcagtagcttgtgattagcctgctgaaattgcaggagttgtgtctgcatttcttggacagagcagatgcaagaggaacaaactggatgacaccaatggctggtcaagttagcagtgacaggtatctcagtcccaaagtgtcaggataatgatttggtcttttcatctctttctaactgtaatgttcttgtttgttcatcatatatatttttaaaaatttattttctgtctttctttggcagatattacaggttactaatttacctgctatctgtagtgaacacatcaaacatgcctatgcatcatatgtacatgtttacttattagctatatttaacatatcctatgtgcaggaccagctacataatttgcatgatgtaatgtaaaatgcaaatggggggccccttgttaaaaaatacttaagaatttctattattaagaattttaagatgatgaaagaaaccagaatatgccagctctaaatatgcctcattgacgtaaatatttttgagctgaagggaattaagaagcacatgcagaaaagctctctgcctcttctatttgcctaaaagcaggacagagaattacaaaaacaaaaggtcttttatgttcctcctcccctttcctgcctaaagacaagatgtaaattctcctttacaacctttaccagctgagagcctgcttcagaaaaatctgggaacagacttgactctttcccacagttctctggcctttggaagcttagggctgttttcctctttgtcctgtcacttctctacaatgtattgatcttgttgaatactttgtattagctgggattctaagccacactgccttgagttacttttcacctgcgtgatgttcatgtattaatagacttgtttgtttttctcttgttaatctgtcatttgttacaggagactgtctcaattaaaaacttacgagggttcagaaaaattataatttcttcccaacaatgacaatagcagagcataaaactaagcacagggcccatgtgagtatggggtcctgtaacagtgcaggtcacaggcctatgaaattgcccctgcctatgaatttcacctgactattccaagccaagagctacttattatctatgctgaacatttctaatgatttccatcttttccaatagcagaattcagtggtctcaaataattcagccaactcacattatagaactcaagtctatgtaactccaagtcactgttcatgcactatagtcatggagttctttttaaatacctgtcatccccatgttcaaacccttcaatgtctccctagtaattaacaaaatttagtcaattttgcctaaaaaatatcggtgagctccacaacctgaattccaacttactttccaaagcaaactctcattaattactgatgatgaccatgaggttttggagagggacaaaaccatctccaaatgtttttgagtgtctcctgtgtatcgtgtcctgtactagatgttttacacatcaactcatttaatccttatgagaacattgaaaacaaagttatccccattttacagatgagaaaattgagattgatagaggtaaggtcaccttacacagttattaactgtgagggtggattaaaatccagatttctctgtctctaaaacctcaggctttttctactgtgccatactacttctaatttgaactgtattttccagtgaaatgagattaatcttccctatagacatgccaggtacctgttatcactttattctggtatccgctccattttttggcatcctatgcttcttccatgcctgactttatctcccgtttgagcctctttctctgccaacgcccatagaaataaaattcaaatgaattctcttgattattcatttggctcttctgttaggcagcattgtgttgcatttttaaaaattatatgtaaatctccatttcagaagagattttgagctcctcagggcacgaaacgtatcacatagctctttattgtctcaagtactagcatagtgctttgtatgcaatatttaattaatattttctgtgtgggtgaaaatgttaatgtcttttttgttggacattcatttccaaagcagaacaattaacatgactggatgtttaaagggtctggatgaataggtgagtgaaggacagaaatgtgctggtaaaaagccctgatctatagtgcttgccaatttccgtggtgtaaatacttccactatagccaattttaagctaccaacagttagagccaactcacaaaattcttgaaaatttcataatcagtggttttgtgtgagccagcataagtcagcttcggtatctctttgagggatttaataatgaactcaactaaggtaaaactgatctggaacaactgaaagcagaggttaaagtaaaataactctgttatttaatctataatcaactatgaaatgcttgaattagagctgcctgtgagaaggaaaaacaatgattccataatgtgaaggctccagacaaaggccaaaagtgcatcaatgacttcttatcccagttttttaaactaaaaaaactgctagctaaatgatttttgttttatatgacttttgttttatatgacttttgtttatatgactttcctcccaaatctgttagcatgcatagagtttcagtttttctttcatcttctcctcttctgctcatttctctctttttaaattttatcataaagtggaacactttttattcaagagaaatcaattcttgattgagatcagaaatctcttgccattcacattagagttgatctaccacaattgcctgcttcatcattttcattctattggaataagtatttacagctataaactatcctgcatcttacatatttctattaaacaagaacaatgtccgtgacagttttctgtctcaggatttatcttattaatatttattgtattgttatgagtgcttagcaaattattgtggttaactttaccaatgcctttcaaataatattttgaaattttccctgaaaggatattgagaaaagccaaatgtaaaaattattgttttttttccttgggatttgcatgttttgaaaacgttctcaattgttagggaagtcagctgtaaaacacaggctaaatatacttttgtctaccaagaattccctttacttgtctgtttcgtgatttgtttaatctttcttagttatgcatgtaccattttaccatagttacctggagatattcttgtctctgccttagtttggcaggcttttcaagtggctcactgagctactgtttctatttcttttagaaagttgtggaggcatttattactctcataactgcctcaaaatctcaagcacatggcctagttaaatcatcttgaggttctgcccatatggttgcagaaggatattagtcattggaaaaaatgggtctaaaatgataatattcaaagatgttttccaatattcttggcaatcttattcactaatttccacggacatttaattagcaagaatttaaagaaccttgttttagtttcctgctgctgtaatagaatatcacagactggataatatataaagaaaggaaatttattgggcttatggttctggaggctgggaagtccaagaggcatgacactggcacctggcaagggtcatccaatggtggaaggcatcacatggtgagcaaggacgagagacagggagaaatggggctgtatttatctttttatcaggagcctactctgtgatactagcccactctcatggtaaccacattaatacattcatgaggatagagccctcatggccgaattatctcttaaaggtcccatctcttactactgttacaatggcaattaagtttccaatacataaactttaggagacatagtcaaaccatagaaatcttaaacttcaaataaacagggattttttttagtagcacagtataaaatgataataataaatatcagatataaaaaatttctgaagttctttttagatagataaatcatggttactattatcttcttagttacatttcattgcaccctattttctgtggtattatcagtcaacatattatatatagtaagacacattaaattttctgagcttgccagggcatcctgtcccctaacagtttttgataatgatttatcaaatgtgtactctttagaattttagctgtcagtaacagttgattttcacaacttttattagactatccatgatgttttttggaaaggtagttaaaaggataaatacattaattatcataaaattatctaggaatgcttttaaatacatttgacataatacattaacactaaaaggaaagcaaatatgcacctaataagcacaaaataagattaatcagagaaatgtgtccttgctgttttggggaagagttatccagatctcaggtaaggtactttttgtggagataaccttctgttttatgaagcttgtaacaagataacaatcaaggcatttttgtggccatgtttatgtatatgagcaagcaatggcaagtgagatactagtttgggggcttaaataagataaaagtagttaaactttattaaaatgcacatattaaaataaattttgaaatacattgtattcaaatattgtattagggttctcttagacaactcataggatacccccacacacacattttatgtgtgtatgtatatatatatatatatatatatatatatatatatatatatatgtatatacacacacacatgcgtacatatatatacaggagtttattaagtattaacttacatgatcacaaggttccacaacggctgtctgcaagctgaggagcaaggagagccagtcccaaaatcaaaactgaagaacttggagtccgatattcgagggcatgaagcatccagcacaggagaaagatgttgtcggggaggctaggccagtctctcattttcagatttttctgcttggtttatagtcactggcagctgattagattgtgcccaccagattaagggtgcatctgccttccccagcccactgactcaaatgttaatctctctctctttttttttgagacggagtctggctctgtcgcccaggctggagtgcagtggcacgatctcggctaactgcaagctctgcctcccgggttcaagccattctcctgcctcagcctcccgagtacctgggactacaggtggccgccaccatgcccggctaattttttgtatttttagtagagacagggtttcactgtgttagccaggatggtctcgatctcctgacctcgtgatccacccgcctcagcctcccaaagtgctgggattacaggcgtgagccaccacgcccggcctcaaatgttaatctcttttggcagtacccacacagacatgcctaggattaattctttgtacccctcaatccaatcaagttgacactcagtattaaccatcacaaatatcataacaaatcgtgtgaaaggaggaaaggggaatagttttacatttcaaatataaggggtccaagattcccttttatagttataaaaattagaaatttttaaatggtatgaatcacttatttcaaatagttgtatttatgatgcttttgtaatatatatgcataagtttacctatatatttatatatgtgtgcatgtacatataatgtataaatacacaaaggcactcatatctacataatgatacatgattctttggatgaattaacttttacattttatgcatacactcttattgtgtttcttgaccagtgcttggtcacagggatcaggacaagttagaagggaggctatgggaggacactgtaaaatattaacacaacttaattctgcagaaaggccagttcacataggaagatggtgtcctctgagggtgcacttacccaagctgtgttccccaattgcttaggacagtcttccatgtctaagtttgtcatgtggcaaacaatcaaatttacctggtagtcctagtgatttgcagagctcactgaaatgccatcgtttaaaagcatcattttaaatttattgtccactgatagatcaaaagatagaataccctattccaagagaaaaactaaagacttctattagaaaaatttaggtttagcacttctaaatatcactatacaacattttgaaaaatgttttgaaaaaacagttataatgcttagaaacatttagaagaatataagcacacaggtattgtgttgaaacacattacctacactttcaatgcaggatgcttcttctcactatggggcagcactttgtgaatttttctgtttcacagtattcagaattcattagaacatgtttgattagaatgcacatgaggcaagcaaaattagcacagtctgtctatcaagccacgtagatggccttgcaaagagctgaatgctagtatatctaagaatatgagattatatgtatgattcatggtggaaatgtctcctttgttagataaattcctgcaaaccaatgcctggaatgccctctctgcctactcgaattctattagctctttaacatccatttgaattcttatctcatctacaatatcttcagcaactctgaagcctccattgtcctctcccttttcacttcaaggctgtcttgcattgttatgtaactatttcatgggcctagatctcatttttcttaataaagtttaagctgtagaaaggaattcatatatttccttgatttcttttaaacacttaacacattaagaacataaaacatacccagtaattacttaaagaaaaaaaagactaagtaaaagggacaatgaaagaataatagaaataaaatgaatttgtttatcagccagaattttgggtgggtcctcctcatagctatgtatagcaatctataatttcagtgctatttctacctacttctaataaaaatattcccacagtaaaggggcaaggggaaattccaccattttgcaacattttggtgattagaattgttgagatatggttttagacagagtttccttcttattcttgggctggtgattttaagattcatttgtgtgttttaggtcacattctccccaaatctcatttttgctcaacacaagaacagtaagagtaagctgggatgccttagtgatatggcctggaactctgcagcctacataatactatccctaccttcaggtattagtgttgctaataacatgctcaactgattcattaaaacaaaggacaaaaaaataaacaaacataaaatcattttcatagagcttaaagagactatccagagagacatttataaagttaccattataaaatgcttcacactaaaaaagaattctttacaataatttggttgtaaattgtgtaaaattctttttccctccatcaattttagatttattggttggagccttgtaagtcagactgacaaaagacagattaacaagagaaaaacaagcagaagtttattaccatgtatatccctcttattcatgggagatgagtaactgaaagaggaggttagaacttgagctcacatagcatcttaacaaaagaacagtacatttttaaagaagtgacaagacaaaggaaaaggactttgagtttctaggatggcaaatgatgggaaagcaaatatatgggggaactaatggaaaataaggactatttagtaaagcttgtcatgcagattcctctggtgccctctcttgactgataagtctggaatagtcttcagtgattaacttctgtccttccaggtaagaggggaatgaaaataatacctttatatatttatctcctgcttttaggcaaagggggagagcagagagcttttcttgtatctgctgcttcttgattgctttcatcttgaaataatctttataccatatttttggcacattttggcataatatggcacataatcctgacatggcatattttggggtgccatattctgctaccctccaaattgtctctacccttctattatcttagcagataatagtacaacctcccaaattttggtttccttctgtgaggaaaacacagtttgtgctgtgaccagtattgtagctcctggggaaacctgtgtggtctcctctctcttctccctgctactgtaatactaacaaaaagaatgtttaaaccataaattgaatcttaaagcaatcaagtacaaatcagagttaggaaaagttttaatcagcaggtagaaaaaggatctagtgtgcttttatttttaaatttttcattaatccactaaagcccagcttgttatttttaccttgtttcatctaaaattaccctaagatgctggcatgacctctagggtgtgactaaaatgtgtttgagtctttatttgacatttaagccagccatgaaaattagcattggtttagagctccagggagcaaagaagtcatcctgagtctgaagaatttctgtggctgtaacttggaatttcatacaaatttgacctgtccaagacttgctttaattattcactaacaccagcatctggctttaacacatcttcatgagtatcatcagaactagagaaaaaaaattcccttaagaaatttttgtacataggtcactctcatgtttgttgctaataaaaattttagaggtcttagtaatctaaaaaatatatattttacctgtaaagtggtactatccaaaaggaactataccaaaatacgtcagacataaaagttaagaggttatgaaaatgtacatgcaattctctttttgcttgttcttagtttatttactgcttgttttcagatagtcaggtagttactctttagagatgtaaaataaagtatggacatgaaaagtagttatttaccaaaggcaattatcaagtatcaaaacatgcagagtacttactgccagttcagggagacaacaaaacaattatatataatatagtagctttttagcccaatcttccaataattgctaggccaacatgctaaatttaagagttctttacctcttaaatttagtagtctcagtaaataaaatttgtttagttctgcaggggcagaaagatgtgatactttgtccctatcataaggtcaaggacaacacttctctaatgaaagagggttcacaagagaaaaacataacacatttctttaaccaaagttttatatgacatggaagccttcagaatgaagatttgaagacccaaggaaaaactgtccatttttatgcttagattcaataaagtgtgaacagccatgtagaagtgttattagacaaacagggaattatctaatagtaatgaactgagtggggaaacccagcaatacctgtccagattcttcttggcctcactgttgtaacatctcttcaccctcctggcttatttggtatagttccttttagacagtactacttcatagataaaatatatatattttgattacaaagactacaatttttgtcagcaacaaacatgagagtgtttcttcctcccttgacctactgttgaccaagactaggtcatagaatttctttatggccaccttctagacagaaaggtagagaaggttagagtaataattcttgtttttatggccggctttggggaaaagggggttttagtttctacggcctgccctggggaaggggaattctgaattctatggctggttttggggaagaacaaggggtgagaggtaggagagcaggagaaggtcagagagaccttggctctgatgctgctactgaggccttccagtgtcctttagttcaaggtgctcggcatgccaaagcagcacattcaggatatcattttctgagcccaacagttccatattctgcccccaacttgttgcacattggaattgttcatggacttacaaaaatattgatgccatatcccagccctagagattgtgacttaatttagctgtccccaacctttctgataccagggaccagtgtcatggatgacaatttttccatatactggggctgggtgaggagatggtttcaggatgattcaagtgcattacatttattctgcacattgtaatatataatgaaataattatacaactcaccataatgtggaatcagtgggagccctgagcttgttttcctgcaactatacgatcccatctgggggtgatgggacacagtgacagatcatcaggaattagattctcataaggagttcacaacctagatctctcgcatgtgcagttcacaatagggtttgcacccctatgaaaatctaatgtgactgctgatctgacagcaggaggagctcaggtggtaatatgagttagcaatgggtagtggctgtaaatacagatgaagcttcactcactcgcccaccacttgcctgctgtgtggcctggttcctgacaatcatctggtcttctcactggtattcatttgttcaattagcatttgttgaaattcacatctatgccaggtgctaaacccatatctgtgccagtggccacgacctgacagtcatctggtcttctcactgatgtccattcattcaattagcatatgttgaaattcacatctatgccaggtgctatattaagtactgggaaattagtacaaaaaatatagaccttggagattccagtgcaatggtaaaaatggactagaaagcaacacactgggataactactgcagaaaggtcagaggttaagtcacactacctagggggtggaggagattgttggaaagaaagaaaggatcaggaaaggttttgtggagaagctgtagtgttggcctaactctagaactgaagataaagaaaaggaagaaaataggtgtaggagaagagaaagggtatcttagagaaatgaaacagcatatgtaaaagcctggatgcattagaaatcaacttgcagccagcctctcatcttatgttttctctaacttatcttgtatatcattgttgaaacatttttctcacagcactgtattacacccatcaatttcctgctcaaaaatactctggatccttactaataacagaatgaattctgcactgcagacgtgacattagggcatgccagatcctcctctaaagcatttaaactgtcctcttcattgtctatctgaagaccccaggtatgttttcatctcttcatttttgcttatatcattcccctgcaccagaatgtccctcctactcctttgaccatgtaactgaatcctccctttgttcagggttccttgataccactccatctctcatctcaatcttttagcatttatgtttacttttactattcttgtttgttggtaattagatggtgccctaaatatttatctatatctttactttttaatgaaattgtaaattccttacagaaaagcataggaccacattcctttatctctctttctgcatatggtacaatgccttaaaataaacaaaatttatttttattactgataacaaaactgaatgacaataatataatgagtttggaaaatggagaaaccaagcatttgcataattgcctagtctttgatcattgatgcacactacttttacataattataatgagagtatacaaattgttctgtattctgaaattttacttgacattgtatcatcaacatttgctatgaaaaataataaatatcagctgggcaaggtggctgacacctataatcccagcactttgagaggccaaggtgggcggatcacttgaggtcaggagttcgaaaacagcctggccaaaagggtgaaaccctgtttctactaaaaatacacaaaaactagctgggtgtagtggcacaagcctgtagtcttagctacttgggaggctgagacatgagaatctcttgaacccaggaggcagaggttgatttgagccaagattgcaccactgcactccagcctgggcagacagagtgagtctctgtctcaaaaaaaaaaaaaaaaagataaatatctttggataataactaaaagcatcatttacctggtgtgccaggtactgctttgcttacactgtttcaacttttgtatgtatgtccttattccaattccatgaggtaacactggtgttatcctggggaaactgggagcactgagctcaaaaagagtagagctgtgctacttactaggtgaccttggatacttattttacttagcgaatcctcagtttccttatctctgagatggggataataatggttcccacctttcaagattttgaggggatgaagtgagatgatggacacgaatagtgcctggcagatggccaacactcagtgtgctttagctcttgctgccgtcactgttgctggtcccattttacaagtcaggaaactggatcaaaggcatttaataactctccccaaatcacacacctggtgtgtgacagagccaggattcaaacccctgtcccaattatgacatgagatagggatcacagaatttaatacgatgttgtccaagtgtaacattttacaatttagtgctacagagaacatgtgcagagttttgagagaaaacacagttggatatctacagattatcttctgcttggagagaaagagaaattgagagagatagagagagagagattcccaggggcccgagctctctacagcagcacagcatggctgggtcagggctcaggatagaattcctgactgcctcctcccaggcggtgtcataactggggcttctgaagcccaacacctgggccctctccttgggtctcaaatggagggttgaatcctctcatgctcacttactaacaagaacaattcccactttcaatggggtaacagtctgaggggaaatgggctagggttttgcctggaagtacctagttatttcttaactttgtagtttggagattcagcataaaaactgaagtcagccctgttagtagtattgctgcttatacagccgtccacccttatcagaggggaataccttccaaggctccccgtggattcctaaaaccaaggatactactgaacctgattgctgtcaatcagaacatattcctgtttatgtcttccaccacacatttaatgccttttctatcttaactaaccacttatcacacactgtggccataacttttgcagtttgaagtacaacagaaaaactagcaagaatttcttttcccttcttcacaatttcaggaagagaagacgtcttaccatagatcttagcaacctcagcatacttttttttttctgccctcattaggttgagaactttcccttattcacttaaaggaggcactttgtggcttctctttggcatatccaaattgccagcatcactaaacttatgctttgggggcattattaagtagaataagggttactggaacataagcattgtgatactgtgacagtcaatctgagaacccagagggctactaacaggaggagagtgcagactgtgtggatttgctgaacaaagggaagattcacttcccaggctggacagcacaggatggcatgagatttcatcatgctactcaggacagcacacaatttaaaacttatgaattgtttatttctggaattttccattaaatatttttggactgcagttgactacttgtaacaaactgtggaaggcaaaactgcagataagggggaactactgtaatagttactgcttatactgctcttgctatttgccatggactaagctaaacacattacatacattattttctataatggatgtgacaatcctacagagtagctactattatctccattttacagatgaagcaactgggcatcttaaccattccagctactgccatcagcatttgccttaggaaaaaaatgtgttttgaataatcacttccagtatttgggatgattttcaataattctaccagcctaactatgaagttatattatctaggaggcctctagttcttatttttaatctttgtaccttcgagtagcttcttacctctgtaactcactcccacagtaatatttcatgagaagccagattctctggactattggttaaattcttttagatggcagtgtttgttatgaaaagacttttcattcttctggtcccttcactggaaacagctagaaagtacaagttttgattacagttgcctaaacaccagttttgaaatgtctttcatttgcttgagcaataaatttgttgctcaatcatactatcaaattgaaaacaagaggaaaggaaagtcaacctaacctaacccaaaaggggaacatgtttcctgggatgagaatgtgtcaaaggcagcatagcatgacctaacacttctgtgtaatcgtggttgtatcatgtgttatgggtaaattatctattctgtaagttagtccagtgtgtgcttcttcaactaactgtgaaagcattcttgaaagaccatgaaaccttattattctaattaccaacacaacggattgataaatgaatgatgaggccaggtattattgtcattaaatagacctcgctcaattatttatcaatgagtctggggttacagctcagagagctgtgcatattgtagcacggtttgcttcagctctgagacctgaagaccagattacagtcttggcaggtggcttttgttgaatgcaattcaagggggtggtacacatttgtttcagtcagacatttggatggtttgaggccaacagatattcaaagtttatccacaaaagcctatttcattttaaccatgtagaaaaatctctttaatttattcagataaatacaaatgagtaggagaatggattagctgtagaaaatcatacatgtaaagatgttttcttgcatcttagtgttctaaagactgttctttattttcttagattctgctatctgtcatggacacttcactgttctgtattgatcaatgtttatcttcatatgagatttgtttttgtatcttctttctaattgtacaatgaaatatgttttctggttaagaaatacgttatcaaggaggatagaattgggtgatactagtttttttccatcctgaaatcatgccagctcattgcaaaggtcagccctcaaaatagtattaaggcatgccctctccttgagtctctgataccttgcagcccaatgtcccttcttgaaggcctgtcacctgcaagagtactttcttacatcctatgagcatcagatatgggggaatgaagaatctcttcttgctaaacaaatattcttggtccaccttctgccccctggctttattttaaacccatccccaacatatctgatgagttgagtctagtaattctgtcttcagtgggctatggggagcagggattagctaaaatggctgttcagggacctctttggtataaaacttggtgggggtgctggcagggatctctcagagaatgaaggaggggatagagcattagagaagaaaagaaattcatacctgagattatgtaatagataatagagtctggactttgtttaaaaaccagaatctaagatatatatgttgaggctagggcggggtagtaattgaaagagaaatatgaaactatacctagcgtcaaggaaaactaacagtaattgaagagacaaaaataaaacttgtttatattgttcaaaggaaaatgatatttataacatctgacaaaaactttattaatgccatgtagacagggttttatattattaactgagtttataattaattttgtactgattttaatttgactgttaccttggcttccttctctgtttcttaagttttgctagtttaatgttcacgagctcacaaaattaaaaatcttggtagaaatatggagtagctatttctttacatcctttttagaacaaagttgtgctttcgaattgaccacttatctagaaagtgatataaatctaataagcaaaactggatgtcttttaaattatctgttaaataactagagcagtggagatgtcctgaaagtgagcactttattacatatgaaaaacaaattttaattttactactaagaagaatttccatttctctatttatatgtgttcattattctagagattaatatgataactcctatgtatacttagttttgtgaatttcaaaattcttgatgccaaataactgaagtatagtaaattctgccgtaacatgatgtatgggttcctaaaaatcccgacactatgcaaaattgggcaataaaaacacattttactaaaaaaatggggataggcacacaatacctagaaatatcactagtggcacattacaaaaaatatgggaatttagtaacaatgacagcaatattttacacatgttaatggttaagaaatttacaataaatatggcagtttactttgaaaaagacctaacgttccctgtggaagttggccttcaaaagggtgcagcttgtgagtttttgagaagtgttgggaggagagtcgttgttgtcccagttgtgagcaggtggggcttttctacctgtgtggggaagtgtggtagctgatggatatggtatgtggattttgtgtattcctacgctgcttggtttagctgggtgcagttttctgcatttacctggcgtttcttgtggatagaatcacatataagcaaatcccagacttgtgttgtgatcaaattgttccgtaatatatcaatcatgttagaacaaggtcacggtttcaaaaccggcattgccgtagaattgactgtgtaataatcccttcaacacgttcacatctatgatcccaccttgttcttgccaccatcttagcaagcaggggtgcgattgcctgaccatttgtttgttttctgggaaatcttgacctattaaaagccacacagttactgaggaaacctgtgtcagaccttgcctaggtctgtgtgagtctgagtcaggtttgctttcctctgaaaaatcagacactcatgtatgtgggacaaagagcatcagaaacatgggcaaggtcatagagacagatcccagagactggattagaacccaacttgcttgattttctgcttagaggcttcagttcaccattttagaaagtgcctgctggctgccaccctccctcctgtcttatcacctctaaaagacattgttaatgcttagacaggatgtgttttcttcattgcatggatctaaaaacccagccatgagaacttagtttttaatttttgccattgctttattggatattttagaatgtgcaaaaggttttagaaattgtttttcaactaattttaccagcacagaggtcatgtcaaatgtcagggtgtttgacaacaaggccaatctagtctatcaattgagtttcagagaagattaatgataaagggtgcaatcccaaagtctgggaatgactttgctttcaagcattaattattgtggaaaataaaattattagatactcccttgtctacatctaccccaaactatgtcaatcagctctatttctagaaggtttacatttattaaacactccctgtggtcaatgcaatggtcaatgctatggaagttacaacaagacaagatattgtgtccgctatcaggaaactgatttgggagttctgtttgatgaccgaagagagtctttaccactgtgcctatatttttatgccagaatatgggtgggtgcacatgtacaggtgagtaatgaggccccactccctagtattagttaagttagcaggtgtgtgctgtttttttggtcactgtgtattgcaaaattctgagtttggcactgatactaaggaacatcttacagaaaaaattccccactgacccttcttttttttttctttttgaaacagaatctcactctgttgccccaggctagaatgcagtggcacaatcacagctcactgcaacctccgcctcccaggttcaagtgatcctcctgcctcagcttccccagtagctgggactacaggtacacaccaccacgcctggtcgatttttgtatttttagtagaggcagggtttcaccatgttggccagggtggtctcgaactcctgacctcaagtgatccacccaccttggcttcccaaagtgctgggattacaggtatgagccactgtgcctagccagacccttcatttttaaaagttgactttatatgttaataggagtttaattatagtcatatgttgaagggtcttttctgtaaaaccacatattccaggagccatccaactgaggacagcattgcacttgtggaaccacaatccaggcttgggttatctgtttctatcatgacagaggctactccatcacttaaactatatgttctgcagcccccgagagctgaagacaagcctggattgcctctatttgtaattttcttttttgtaaatttttttttggtaaattgtttttcaaacaaacaacaaaaatgactgtcccagtcagttcaagctgatagaacaaatggccatagaccgggtggcttaaacaacagccatttatttctcacagtgctagaggctgaaagtctaaaatcgaagtgccagcatggtcgggctctggcaagggccttctcccaggttgcagatggctggctccttgtgtcttcatgtagtggaagcagggctagctagctctctggccactacttacaagggcactaattccattcatgagggttctacccccatggccaattacctcctaaataccccacctccaaataccatcatgttggagattagatttcaacatacagattttgatagggacaaaaacattcagtctataacaatgatcaaataaggttacaaaaattatagtgtatgtagcatgcttgcattatgttttgatgaattaatgttttttattatgcataccaaagaaactaatgcaactgctgtaaatgtataaatatttgggagtaatgttaaagtttacatttaaagccctttctaaatgtgaggccgaaagtattccttttctctctctttctcttctcaaccccatttactttacagaatgatttttctgttttaagtcataattgctttttttttacaggattaagtaccaggtcattaagtgtgttctatgtcagtttgacctaacctctctgcccttttcttttttctaaaggaattctttaaaaagaagaagaggaagtattttaaaataaacatttgactgccagaatgtgatgtaaacttcaggttcaattctacacttgatagaaatgaaaagaactagtgttctctattttgacatttagcatcaattccctttcagtgattccagctgattagtaagtgagactaaaatatcttactcttcctggtcagcatttaaaaatttaaacatggattgaaaatttctaggttatgaaatacagtctaggttcacctgtgaaggatctagaagaaataagactgcagacctggtaaattcaaatgtccactacttctgtattctagtcattgcaactcacctccttttatcccttatgttatttttattttctcagggaggcaaaaaaatttgtgagtgaaaatgaaggggctcttgggaaaggaaaaggaaaacggtggtttgcatttaagatgatgatggccaaggtaggtatttttatagttgtctggtttatggcatattgcctctaagaagaacactggttcttttctaaaggggtgaaaaaaatcttacattttgtatatataaaacacaaatactcatacagtatatacacagtatatctgtggtattgaaatttacaggggagatttaaaaaattgttcttagaagagttaaaatgaaaaataagtcaagaaatacagatttatggcaaaagacttacttgtgtgactttagcacttccaaatataaaagattgcatcctttttcattttcattctctggaagtgaaggggttctggtcaagttgtttttctcaaagtatctgtatagtttttttctaccaggaacatcaactatacattggacagaaaataagaaaacaataaatgatatactgatacaaatatagattttggggaaagacagaaaagcaactaacatttatttaacacttactatgtgccaagcactgaattgaattcttttataaagttatatttaattcttacagtaaagtaggaacatagatattattatctcctctttacaaatgttataccaactgtaagctaaatgtattcccataaagttttgtgaataaagttcatatatcctaactttcatatatatatatactcacatacaatagattaattttgtctgtttctacagtttaaataaattgaatcatatagtatctatgcatttgtttctggcttctttgatgcaatgttatgttcacaagatatatccacgttgttgtgggagttatacttcatttttattcatgtgttgtagtctattgtataaagatgctgtgacaatgtatttacccattctattgtagatggacatttgggctgtttctagttatgagtaatcttttttttttttgttcatttttaaaattaactcatacacaattacttgtcttctggtttgttgaaacaataatgcagacatttgctacaacaatgactgttaaaatggctggccacaaaatctccagcaatacattaatctgaagggcattcttgatgaagttgactaattttgccattttcatccaccttatagtatttcaggacagccagcttaaccttccttttcttatgcttattcttctttggagtggtgtaagacttcttccttttcttagcaccaccatgaagtctcaacacaagatgaagagtagactccttttgaatgttgtacccagacaaagcacatccatcttccagtttcttgccaacaaagatcagtctttgctgatcagtagaaattcctgtcttatcctagatcttggacttcgcattttctattgtatccaagggttcaaactccagagtgatggtctttcccataagggtttttaaagaaaatctgtgttttggtggtggttccactgcagaaggcagatgggaaaaaaagcgtgggtgatcttttgaacttcagacttgtctcatgctattatttagacaatagtgcctgtccagctcccacttcatcccagcatttgcatacatgcaaaattctctgccacattctcattcttcctggtggtcctcttgactatggatgacccaacattggagttaaatagaaagaaggccttttgcaaaatgattttatgacttgttgtcttctctttcaattaagctgaccaatctgcctctaccagaatgcagtgtctcatgtcatacaacttaccatcttgtattgaactcacctatttgtacacagactatcctggtagatcagaaggctttcaagacaggacctggaaataaaagacagaaaataaaatttattttgtttattatttttattatttattttatttaattattcatattgagtccttcatacaatgaaaactaattaaacacatactctgttccaatcaccctattatgtgctaatcccctgctttcttattgtgttatataataaatagctgtttctgagaggccagcatattttccataaaacaggggatcgataaacatttttttgttgaattaaattggtctggggttagtggagaacagggaaacaagtgaaacctactgtttccccctttgactagaaagtagtatttgctgccagagagacatttccaagcttactgcattgtaatgttttgaggtgggggataaacatcttgacaaatcaagaggttggactttacttttgtatttgactttcttttcagaaatgggcaaaattcctccgtgattttgagaacttcaaagctgcgtgtgtcccatgggaaaataaaatcaaggctattgaaagtaagtccttatcagatctcaggtggagaaggttgtcttagagaagtatctcataagcttatcagatgcctttgtcagtttctggacttttgggaagactagaaacaaacaaacaaacaaacaaaaaccaaatcaacaaaaactttgtttatgcctgctttcgtcactgtgaagatttgctagcacttaccaaggacaatactggggaccccactctcgtgttctaccttagtccaaaacattaccattctaacctggttttctctcctatacagggaagtcactattgtgcacaatgacattgaatcatcttacttggaaggcagagattttattttggcaatgaacatgacattgagaatatatactctcatgaatgttagacagtaatcaaaatgaacaatgttttaacaagtgaagaagtcttagtctgggcgcagtggttcacgcctgtaatcccagcactttgggaggttgaggtgtgcagatcacttgaggtcaggagttcgagaccagcctggccagcgtggtgaatccccgtctctactaaaagtacaaaaggccgggcgcggtggctcacgcctgtaatcccagcactttgggaggccgaggcgggcggatcacgaggtcaggagatcgagaccatcccggctaaaacggtgaaaccccgtctctactaaaaatacaaaaaattagccgggcgtagtggcgggcgcctgtagtcccagctacttgggaggctgaggcaggagaatggcgtgaacccaggaggcggagcttgcagtgagccgagatcccgccactgcactccagcctgggcgacagagcgagactccgtctcacaaaaaaaaaaaaataaaaaaaataaaaaataaaaataaaagtacaaaaaattagccaggcctggtgcaaaagcctgtagtcccagctactcaggaagctgaagcaagagaatcacttgaacccgagaggcggaggttgcagtgagccgagatcacactactgcactccaacctgggtgacacagccagactctgtttcaaaaaaaaaaaaaaagaaagaaagaaagaaaaaaaacgaagtcttaaaacctcattttcaaatctctgaagtagaataagcaatagtcatccaggagcttgctatctgaatattcacattgtgcctttattttgtagaatattcataggaaggaaggaaggaaggaaggaaggagaatatagccaatcaaaaacctatttagtttagtgctttaggcttagaataaggcaagtaaacattttaaaatattgtaaataaaaatagtaaattgttttttaaaataataatctaaaaaaagggataacatttgaaacaattttgagcacaatctttccatattctggtttctaacggtttcaactaggatctgatttccatccattcctctctagattggaggcaggttttcctgctggttaagtgtggcgttgtataattaaaatggaggctccatagggagataacacagctgatggatagcttgctgacatgattgggcatgttttaggagtggctaaccctcggttccctgtctctcaatatcagatgggaattattaagtggcaatgaattaaaatacatcagctcattaattgtatccccttccacacattcccagtgccatttctctcttgctttaatttcctccttaacacttaccgctatctaaaatgctatatctttaatttaattttttgatgtaatcttaattcattttatgttcatttctcccaatagatgggaaatttagttttgttcactcctgcattccacttggcacttaataaatatgtattgaataaaattacagacaaactcgctaaatgtctaccaatctaggaaaaaaagaaaggaatttagatacatcaaaaaagagaagacatcatggatttcttaggtttcaactgtacagctcaaatgtggtaggttgagaggcactgaaaaacaaaaggccatttggagcattacggtcctgatacaatatatatagtaagaactctgaatttggtctttgctttgctgcagattagctgtttgacttctagccagtcatttaactcctctggacctcagtctactaatttataaaattgtagggctgagtcttgatcagttgttagataaatcccaagaaatttgtaattaatgataggtaaatatatacatttgaaaattatttttaaagcacactagagcaggttccagcctatcctaatagtaatatcatgctcatttgtgttccaataggctatagccagtgaaacaaaaacagacagaattatttttattgccagaaattgcatgcagcaagagttacacatatgaccaccatccatcatgagtgtcacagtagaaaagacagattgagagctatccaataataaccttcagttatctcctctcttcttctcttcttctagtaaatttggaaagccacgctggaaaattgaggcaaatgtagattatttttctttccatatataatttatgatttgattagtttgtcatgacttcttcactgttaatggtgctttgtctcaactgtgaagaactgagctttattttttattttatcaatattcaccacaccaccatttattgagtaccaccatgagtcagatgctctacaaacattgtttcatttaatcttcagtgttcctgcaatgtgcacattaaccttcctattttatagttgtgattaaataactgtcccagaattagtagcagagctgaaatataaggcaaaatctgtctgggttcaaaacgtatgcttttccatgtgttaggctgctttctcctttagggaaggttttacatactttttctttttaaatatgttttgcaccagttcataaaaagtattctacgaggccgatggcaggatgagtagttatagattttcttgatcgttatcaaggaattatttttcattttctcatgtatttactttttagtgagtgatttatttaattatatgttttgtattctataggatgcttaatgtactgattttaatgataaccatgaggctttgggctatagtattagttgaaaaaatatgaaacctatgtaagaatatattattagagcactggattggactatcttataaaaagtaccctactaaatataggtaaagcatgtatctgtgatcacctttgaaactgaacttaatgcaaaatgggaagaaataggacatgcaatggattttctgagttgaggactttttgacccctaccacctctgtagtttggacaatctgttgaaatctctggttctgtttccacatttggggctactacaatatctacaacatcttgggtttaactagtcactatacaagatcatttccagctcaacattctatgatgtgtaagttacagtcagttttacatgtatatgtaggcatgtgaaattcattaatcatacttttgattgataaatcctcaaaaatttgaatgcaaaacagatttatactaagaggggactatataattgccttctcaaattctttttgaaataaagttggttaagtgtgtaccctacttatagaatacatatttaattataaaacggatataaatgcttttctcttaaataaatggccatttaatcttacaaaaggttcagaagtatcattgtattccatttcgacatcagaatcatctaatatatatcttatttaatcctcagaataagcctgacattattgattaactgagcaaatagtggatgcctaacatgtttctaggcactattgctactgccaaagacagcagagactctaccctcattgatcttacatccaaatgtgttaatgtatgtatgcttggatggggaagacagaatataatataagcaaataaataatgacggtaattgtggattgtagtaagtggcatggtcaaaagaggagctgttgccttccattcccaacagcctttctaatccacttttccccactctctgctcagtatctagataataccaaataagtatttttaaaatgtggctaaaggagtccaaaattaacagcctttactgagttttcccaaagctctgtccaataatttgcagaatcaagagcgggacccaaattagagtctaaaattcatactgtttccatcttgattccagtaagacctagatctctttattagtgtgaagcggattctcacctgatgactcccaactctgtttcacttaaaaaatagatttgataattcctgccacagaggatactgtgacgttatgcatcacttgggaatactgtggggttttactgtcacgtcagccttaaggggatcatgcctaaaactcgatggttgctcctgtggacacatcttattcatctcattgaactgtgtatttttctgaagcaactgcatgtttgtacccccaggaaatataatctatacccattgtgatgccaacattattattaagaccataaattaaataattgaatgtatttctagctggggattacaaatttttctcaggatcaaaatctactttttcctaatagtagattgcatcatcaaaattatagtttcagaaacctattttttttcagacaggaaatagctttggataggcaagccaaagcacagggcttaaaccttatgtttccttgctgccctaaggattctagaaaatacaaatcaaatttgtcacatttaattccctacccctaaatagttcgaaaaaattgtgcttcacattctagcctaacatgatggtatttatattgtagtcacacagcaggtcatttaattggtcttttcccatttagaaatactcatatttatctgcttgtcttattacccatctattcaagaggaaatgatgtgttatgacagactacaaattactttgccttaataataaacaaccagaaagagagttgaaattttaactttaatttgaaagaaacaagaatattcaggaacaagaatatgcttaagcataaagcctcagtttaatacgtatcagagactctgttttttggttgttgttgttgtttgtttgtttgtttgttttttgagacagagtcttgctctgttgcccaggctggagtgcagtggcgcaatctcggctcactgcaaacctctgcctcctgggttcaagtgattctcctgactcagcctcctgagtaggtgggattacaggctcctgccactatgcccagctaatttttgtatttttagtagagacggggtttcaacatgttgaccaggcaggtcttgaactcctgacctcgtgatccacctggctcagcctcccaaagtgctgggattacaggagtgagccaccgtgcctggctgagactctgtttttatacattaataatttactatggaagcagcatttatcagtctgattaaagaaataagaattggtcattatgggcatcaaatttgtgaatctgactggctttagctgattgatggatattatctatacctattgtttcagaaacacatattcattgcatgtttattgtatatatcatagtcttaagaaaattaattgaactatgttttacttaaagggccatatagcagtgtggttaagagagatctagatttggagtcaaacacctgtagctcaagactgcctggtttagaagcctggcttccttgtttactagctatgtagcctatagatctaagtctctgtaaaatgggaaaacaatagttcccatttcgtagggatttgatgatcattaaataagttaatacatatagatcaaattggtgtttgaaacagtgattcactaaatgttacctattattaatcaacttttgattcagtcaacaactgtgttaaagtttttgtttcctgattcatagtgggactaataatacttaacctcattaagttctagtggcagcataatgagttgatgctgataaagttcttggaacacataactgaccatcaagatatactagctattattattattattactcattttgcttccttacactgagagattaagtatgttaaaattgctattcttttcatttatgctcttttagtcacactaatcaggcatttctttttagtgaacatcagttttagttaacaacatccggtaggatagaaccactagataaaagggataaagagggaagatttcttcttttttgtttttgtgttgagacaggaaaaactggagttttatgacaacttgttgtttcattttctctactttaagatcttcatttgttttgttactgtgttttctcctctgctattgataggtctagtgtggaagaaactttgtcttctggatttcttagtctcttccacctgtgtctgggtctttcctataatcgttctagttttaatgaaatctattggcctgcaattcattttctttacacttaagattctgtaaagactcaacctccaaataaaatagttgtgaagccactctcaaatctgagaactggagtttggaagttttggactctaaagtatatttcattatgatgcttaagcatgttggaggaggggatactttctgaaacatcttaattcacttctgtcttttgcatttaagtatatttgtaccctacacgcaagaaattcatttgtcagggattgtgtgtaggtgctgagaggatgggccgtggcaataattagaaaaacaaaagcataaaaagtgaggaaggaagaaaggaatggtgggttagtatcctatatgcgggatttcatactggaagatcttacatgcgattccagggaaaaacttacattgatacctagtgaccaaggctttcctccagtaaatgagtaactgtaatgagtaacaaactgtaagtccactgccttcaataaaacatgatgagtgaacctggctgagcagccctcaggtagtcgttaccagagaatgtagataacggccatgaaatggtatgaagtcactgggagccaagtgggtgatcagatgtcctaggagaagcagaccagtgcacctggtgacagtgctgggctgggctgaggtagggtggggtggggttgtgtatcaaaaccacacacccttagaaaccttatagaactctgcacccctcggcaatgtgaaatcaatccaaattctcttgtgagcataaagaaaaatattgacttcaaaatcattgattttttccaaaatatccatttaaagattgacttcttaagtttctaaaaaaaaacctgccactgttttacaggaataagaaagatggtaggtaaagaatagacaaaggggccaggtgcagtggctcactcctgtaatcccagcactttgggaggctgaggcgggtggatcacgaggtcaggagttgaagactagcctggccaacatggtgaaaccctgtttccactaaaattacaaaaattagccaggtgtggtggtgggtgcctgtaatcccagctactcaggaggctgaggcaggagaattgcttgaaactgtaaagcagaggttacagtgagccaagattgcgccactgcactccaacctgggtgacaagggcaaaactccatctcaaaacaaaacaaaaaaagaatagacaaaggtccagaaatagaggtgttactgtcctgtgaggccggcctcatctaagtaagtagaggctggaatttgctacccatgaaccttccttttccattgataatgcttccccactgataatgtttcaaagccagaaggctccagaaaatcattggtcaatagagatgtttagctgaatgttagctgaatgggacagaacacatgggctgatgcagccagggactgaaggtgtttgttgttttttcttgggcaactgacaatgataatttggaagattgggaaagctagcaacttggtgctgaatcttaaatgaccgtcaaagaaacttttgcttttgtaaatctatgaaatctgaacctaagacttaacctcttcatttttcttcttccactctctgctttaagagggtgctttttttttctctctctcccaatgagaattaaccaatcactttacttttcacttctgggggcaggggtgagttgactgaacattcttgcctattgcctattcattccccaaagctgaagtggttttttaaaagtcatgctcatcaccccttcctctggccctaatgcttaacacctgtcaatgacttctccttacattttaaataaaattctcactctttaccatgggttgagaggccccacacactgtggtttggcctctccatccttatctgtcaccactttccctcattcatgtactccaactgcacaggcctgagttttattcctcagtagtcccaagcccttgccccttaggatctttgttctggctttttcctctgcttgagctgctcttccccagctcagcatgttgctgtcttttcttcaaacttcagatctctgcttagatgacatctctgatgttctttccttgacaaaactttctaaagctacccctttcaatactttcccttccctcctgtaggacctgctattatctctatctctatctcctgtcatctacatctatagctaatgtctatgtctgtatctctatctctgtatctttctatgtatcttacatatttgttgtatccatacctcactaaaatgtaagttctattatagcagcacccgtatctatgacattgtgcttcacatctaagataatttctggcataagatgtgtggagtgaatgaatgaatttcagcttttataccatccctgtaaaattccagtaatgggggaaacagcacagaactgcttgtaagataactatccgtaaaggatgtggtaaactctttttgagaagaacattgtttgcctgagaaaaggaagagaaaatagcagtaattataattatagtgatagctaattactagctaggcactgtagttacctttacatatatttgctcagttatcagtattaactcaagaaataaaatgcactctgcaggtggcaatcatggctgctcagcaaaaggcagctttcccttggatggactatgatggggtaggtcacatgcagtctgcataactgcattctacgtaccttctacattccacatgacagggaatgcttccatcatgattaacattttctcttcctgaatagagagaaaagaatgctatagcctataaatataaaaaggaccaatgcctcacaattaatggattcattttgaaggcaaccaagacaaagctctttttgtttgtttgtttgctttgatctctcttcaaactttttattttctttgtaataggtcagtttggctcctcagtggcctcatacttcctcttcttgagatggatgtatggagtcaatatggttctctttatcctgacatttagcctcatcatgttgccagaggtgagatctgacttccagtttacaaaacatgctgaaaaatgtttctcctagaaaagtatttatctcttctttaaagtagaataattaactggctattttcacgtcttagagtcataggatttgtaatgagattaaccttcaaaatggtgcccatgggccaaagctcccaatccttgcactaaagggggtgtaagcctcttgaaattatataacttatgtataatttcacatgtatgtttaaatgtgtatttttatgtggaaagtttcatggcttctttcagtttcccaagggggtccctgttcctaaatgttaaaaactattgttcaagaggaagactttgacaccttgtgagttgtatttctttattttgccaagttagctttgaaagaaatgcttccttaatgcaactcaaagcctccagattttctatactgaagaaacacaaaatgaacattttccccctaagatacaaagtaagataatgcccacaacacacacacacacacacacacacacaaatagtgggatgggatgagagtgggatgggatgatgaggtccaaagtcagaaactaaaacacatagagggtccaaatcaaagaagacaaagccctgagctaatgtggggaaagggtcagctgaggccaaaaagctagactgaggtcagagccttcactcatatgaagttaaatgattctgacacctttgaatgcttaccttacagaagttggattaggttttagttaacctacaaaggaccttttaggaccagtatttcaaagcaaatttggtccatacagcattgacagtggccaaaatttggtggttttgggtgactttttatcccgatagcttcaaatcagtgccagtttctatactaagactcctattaacataataataataataatgctttacattcataaagagatttgagcttttaatagtacaaagcactttcacttcttttacttactgtgcgtcacaacaaatttatgatgtagactgtagaagacattttcttcacccatttaaaacatgtaaatggagtcacataatgctgatgtgacttagctaacatcttggaatatatttttttattaagctgatctaggactagaacccatgattcaatccctttctctaagattttgcactttaatccactagttttataatccttgagataattccagagcttctaaagttgtctggctcgtagaagacagtgaccaaagatcagaggtcctgtgtagtttatttcccaagtgcacactttcaggtaatgaagctgaatgtgtgtattttatctatttcaaattaaccccagcttttttttttttttttttttttgcttacctttctaaggaaatctgaaactcctccattccatcactggctactatgacgttacttagtgtcagatgcaggtataaatggagttttatcagcagcatttattctttcccccacaccatgctgcctccatgtggagaaaatgaaaggctgttgctgatttatttgaataatacgaaattacagaatgtctgctatgtagtggatggagtgcctacgtgttaggttggatgtattccaagagctaggaagcattctgtctttggatacccttttataggttgtattaggtgctgaggggcatcctgttttctgggcaatgattaccaactccagcaaaagaacaagagaatggacaccctgcatgctgactttgcagaaccaccagaggccagggcagtcatctcctggcagcaacgctgtatttttcagctgcctctacccgacgggctcactcagtattcctccaaggcaaatgcccttttgccccaaggtcctgtgtccctgggcaagcctgagaccttgatctcctttgtcctctgtgcccccgaactttggggcgagacagtgtgtctggaacccaccttctattctgttcggaccaggaagccagatgggccaaaggcctactttgggaggttgtgcagcttgtgcacagggagtgagcagagattgatgtccagcccttgttcagtcaagctctgcacccaggcttcaagccatattcatcttctgttcccagctttaggagggaagtttccatctcacagaagaagcaacatctgcttggtaagctatgggggctagaaaggtgctctttccagttctcaccaaggcaccttcctatgaccctattcttgccctctcactggcccactcttcccagtactattctccctaccgtttttctcttccaatctggtagcatgaatttgaggcagcagtcctgaattagtgatgaagcagacaccataatcagggtgcaagtgttctcacgttgcagacacccacaaattacatgattggatttccttgagttctctctcttgacatgaaggacagaatctccctccaccctcactcctaaggggtattctcttatgaaagtgtgggtaagattgttttgttgagtcctatgtgactcaaaaggctacctctctcctttccagacttccaagtcagaacagtttggtggtggtggtggcaatggggtcctcagaaagccctctggggaatgtggttgacctgactgctggtggtcccctgaacttggaatgcagggtcctttgcactccctttgttcttacctctggatttagtagtcgattcccagaaaatgggaccccacatggagacccaaagagtccccataaaaatgtttcagaagggcttttaaacaaaaccatttgtgatcacatgtgtggctcagactttgtttctaattgttcactgctttctttgcttcttcatacagtacctctggggtttgccatatggcagtttacctaggaaaaccgttcccagagccgaagaggcatcggcagcaaactttggtgtgttgtacgacttcaatgtaagtgtctccacacaagtgtattggtgggaggatggatttttatttagtttattttattctgaaacccacggcctcctctcctgggtcaggctgaatgtcttaagaaagacgtccctgctccctttaagaaagaaaggaaagaaagaaagaaagagagagagagagagggagggagggagggagggagagagagagagagagagagagagaaagaaagaaagaaagagaaagaaagaaagaaagaaagaaacatgtccctttatataaatgtgactatgatttaggacaatggtaatatgattatatgggaatatagactactggataaaggtgagctcagagttcaaagacttgaagcaaatattcttatcactgactttggaaaagaataaaggaagagtttgcaaatgtgctttttggaaaatcttgttggattcctagggaattaaaacttttacacttcctattaacctctttacttcctaaacaagcctcctatttagtattactcaatagttagtactaaataaagctaaatattgaaaactaagaaatactaaattctaacttttaaataatactaaaattagtattattccattgtagtattcaaatgagcattactccttgagctcccttaggtagagattattactatggaaaggagttatttctgtccattgaaaaaccattttggactatatgattcaagtcttcgacaacaatgtaattccacatattctttttttaagtagtgactagactagaaatgtctggaagcatatgcgtgggaaagtagccaggttgaaattgaggaattgataattcaagtaatttttggaggctagacaatgagaataaaattttatacagattgcagaatgaaggagggaaaagcagactgcctgtttatagtgttaatatgtatatctcacaaacattttgatttctacttttaacctccttaaattgtgagtttcccaaagaagagatcaggtctgctacatcttttcagcccgtaatctagtcctcatccactacaggctaaatgaatctcattgactgaaaatcctgagtgagggggatgattcatagagccttgaagtaagaaccacaggaccagtttatgtgaggagtaccagaacatgcaaaccttaagaaaagtttcccatctccgaatgaacaaagcaagctattgagttagcatgaggcacaatgatagcaacaaatatgtggcatttgtaatcttcaatcacccctgtcagttggactttccatttcaattcagcattttttaaactgaattataaacttgcataggttttacaaagatgaatgtgacatgattcttgacttcagggtactcgtgatattagaaggaagacacgtaagcaaccagtatacaagatgctgtgcacaaagttagcaaaatttaaaaaaaggaaaaaagatcctggggaactgagcaagtggttcttatttcttcttaggcgggtctgggttttacagaagagatggcctctgagttggattttacctctcttttctatcacttctagattttatttctcttttctaccacttctaacttcttccacctcttcctcctcccctccctttatccctccctttatttatctctctcactttcaaatttcaaataatgcattactatgtccctttaccactgttttaatttctcattctcttcctctgattagcaaaatgacaaacttccagtctgcttaataagaacaaggacgaagatcactgactttttctgttttttaaggcatagcagagaaaggaaggactaaaaatatgaacaaaaggtcttttgatttttatatatagatttctgaagtttaaatacttctgaatttcccaatgcactgaaatggaaaattttgggcaaaaatgtccatttgagatttgaaagttagtgactcagttgaggaagacaaacagaaaagttgctgtaagagagttactaatgagtggacaagagggtctgagaggcaaattcaggggaaagtagagggaaagggtttggatgatgagtgtgcttcccaagattgtatcactgcccttgacagctctctcacatccagtttggtgaaatatgatttgtcggtcagcaggggatacagaaaccagagtgttctatgatagttatttcaaggcctgcctgaaaacaatactaaggcaatgagagaaattttaaaggtcaagaaaatataagaaagccattacactgattttattcacttacaggcttgctgcatgctggtatcagtcattaatttggtatgcatcattgctggggttagtagtgattttaatagctgtatttctccaatgtctgcatcatgcagtgaactgtgattggtaagtaaggtccctcacttcacaacccacttcatggtgggtatttatatctgagactaagctcgagtgttcttatatgtgaaatggagaaaataatagtatctacctcaaaaagcatcaagtgagataatgcatgaaatagcagatagctcagagtatgtagcacacagtacaggctgagtattccttatccaaaatgcttgagaccagaagtgtttcatatttcaaattttttcagattttggcatatttccgtatacataatgagatatcttgaagatgacattgaagtctaaacacaacattcatttagtttcatatacacctgtacatatagcctgaaagtgattttatccaatattttaagtagccttgttcatgaaacaaagatttgatggtgttttgactgtgacctgtcacgtgaggtgaggtgtggaatttttcacttgtggcatcatatcggtgctcgaaacatttcatatcttggagcatttaagagtttagatttttttttattaggaatgctcaatttctaaatattccttattacaagaaccataacttgaccaaaggcaaacagctattaggaaaccgaattgggatgcagggctggtggtattacacacggtaatgtatgtggatagtggcaagctagtaaaaggacttttattataacaaagaagtaaatacataagtaaataaaagtattctgaccttaatgaggagttcttgaaagattcaaggaaaggaagcaataggattatatagtcattatcaaattgttcattgaataacattattatttaaaagaaaataatactgctttaaggaattttatatgatatacaagttttcatgacttttgaagtttgaaagatttgtcttttgttttggcaatgattatattctaaattcagcaggaaagataggttgattcatattaagggacactttgcttttacatttttgtaagaaaaaggaattcagcccatcctacaataagctaataattgagcacattctctatactagggtcaaaataatttcacaagtacatcaataagagagagggaaggacctttaattattaaactgaagataacaacaagaaaaaaatgtacaaagcttaatttaaaatataggagatttggtttcacagtaaaaatccaaaagaataaagccaagtagtcactggtaataagacattatagattcaaatgagatgctgtcttggtcaggacgtggtgtcctccacggcagaagggaagaggctgcctgagcacagattgtcttgagtatcgtgcatagatggtagagatcagacgccacagacagccgtgggctgtccctttaagaactcccatagaatgggcagagatgtcctagaattggacaataaggaaagagtacaaggaaggaaaaataaaatctagccaagctcaaggacctgtatgtgttacctcaggttaaccagacgtttctcagaagacagaatctaaatttctacttacattgcttttgtttttattatcatttttgtgaataataccaaaattaatgtagactaagtacttatatgggcaggcactgtgcttagtgctatgatatttctatttatttatgaatattatactcatatatttatagtgatttatactacttgtttcagtatgcatcaagaaatggaaggcacagatatcttgacagagataatttaatataagaaattaaacaggtattgggtgactaaaaaggcaaaaggggacattgaggtaacatagaaatggtaacaggtaacacagaccagtttttacccctactgttgggagaacaaaagaggaagtggggttattagaatctaggggcttggaggaagggcgctgcatggccccaagaggtgtgatgagattggttttgagtgtgctcgaacagactggaaatggaaccaaataccgttaccagagtgaagaggcattgctggagccatgcattcaggagagagcaaatcccttctcctgactttttgtctaagtgcctcctataggaaaaatctgcaaggaatccgatctcaaaggaaaaaagtagctccccaagtcccgtctccagcatcacaaagcagcatatacaaggatgggtctgaagctgaaacagcttactaactggcacattattctatttatattatgacctattcctcttcctagtccagtaaggtagatatgactattcctaatttacagatggagagactgagttttagtaggatttggtattttcctccaagttccgtggatggcaagtggagaggctgggatgctcatctggtctgcctgacatctctgtctgactctgaagcctaggacaagctgcctctacataggctactaggagccactgagatggctacaggtttatactggaaattcacaaaaataagagaattttagaaatagaggtgctcttcgatatcttccatcctatatcttaccttataaagttacagaaattttgagttactgaagcatgttcagggtcttatagttgttaagaggctcctaatctagtgttctcttcatgtcctgtattccgcccgtaattttcctgttgtaatttccagcaacattctcactgactgctcctggaacatttactgactctgtttcatgatatatctatttcacaaggggaaatggagttgaagcatttgggccccattttaatctttcataataatcttgtaattcccaaatcagcttctcaaatagaatgagagctttcatgtttttttttcctaaattctttttgtatcatttaaatattatgctttattaaaatattcataatggaaaatcatactttgaaaattgttattattaattttgctttggttggttagcaaagttctatctttagtttttaaaattaatttatttttgaaatagacaataaaaatcgtatatttgcatgagttctttgcttgatcctctgaacaatgacttcatagaggtgctcactctgtattgtcagatgatctaagtatacaacccagtatacaacccagtattccatctatcatggcaccatggaggaaatcattgacaaaatgtttttaaactccttaaaaattcataatcctgacttttgcaaagcccaggggtgccaaagcaggcatccctgggcttttgaaaaatgccattatttaagctagagccgttatctaggctatcattatctaggtagagtttggggtgtgtgtgacctcaatatgaaaacatttggatccactctcttggatccaaagagatggcatctggaggctgtctctcaaaggagatctgagcagcacacccagcaacaggatcagctgaccttggacagactatatagaggtaagttattccacatagaggcaggtgaacagaagcagaatagatttaagatctgcacttacagaataatgtaagataaacacaagcatgatctcttatggtacaggagcctattggatgggaaggatcagaaaatctttggggtaaggtaggggaggttgtgaggaactaccaatctgtagagcttcatctgggaaccttggaacctcctctccatacccatgaaagcgcagtgctctgtgacttagatgtatatatcacaactcatccaaattctcttcagttaatagtagacaaacaccatacacaacatgcatgatcagctagtctcagggcttttcaaagtcagaatttaccatttatgaaacactgtatttttaaaatattcttattgagtgcataatgatacatcttactgatggtgctggaaatctgttttattaaaatagtaagaaacagagagattattatgtatgcaatgaatcaaataagcagaaattgtatcatgtaaattaatagaagcagaagaatgagtttaagtcagtaggaagaggatgtctttgttggcaagatacctggagagacaagggtgatatagaaatgataaagaagaaaaggctacacagttttaatattcttgtgaggagaaagaaggaggaactaaagtggaatttggaaggagcttcagctgatatcagacagtgagatcatatgggtaaaggtttaagttgtgagtaaagggaaatgcattctgcttttcaccttgagagcatcttgtacattgctgatggataaatggtatgtctactttgcctccccttttctgctgattatcatagatgtgggagatagaagatatcctacaatgggcaggagaggagacttaacacctattatgtgttaagtaggtacatacattaaattttatcctcataacaactgtttaagatggaatatatcatcccagattattccttctgccctgcctgcctcacatcccatcttggaggtttgtccttaaaggagacaggttagacacatatagaatgttaataaaaaggagataagttctttaatcaacatcaacaactcttttcagtaataatgttccaaagtaaaggtgtcttctctcaaacatatctcagttctcttaagttccttcatctcttattgcactggacacaggtagaggagatattttgtgattcacacgtggaataacacatcttttgttttagaactatttcagtggttcgaatgcatctttatttgaaaaggtgaatcattttaggtttcctgaggtgtagacatcaaaattatgttacatgcaggagatattgggggagggaggcgtgtgaaggataaaggagagagtgaacaagagtagacaggaagagcttttagatggtaatgcaggccctatacctgtgaaaggagagagaaaaggaaggatttaggaagagtctcagattgtactacagttttgaaagagtcttggccaggctaacggtgagtctctaaacaaagtatgtccattagataaattccatattggttagcaataacccagctccagtatttcccatcatgctcagtcattatctaggtagtggttggggtttgtgtgacctcaatgtgaaaacagtttggtccactctggtgggtccaaggaggtggcatctggaggctctctctcaaaggagagctgagcagcacgcccagctgctaccttgaaaatgtgactgggctcctccactttagatcatagctgttcatattgctgttgttgctgttatttagtttcaacaggtttcaaatgcagccagaatgacctgtttcccacatccatcgtctgggcctacctccgtgctgggtcagcagaggctgaacttctagatcatgaataattcttcggtggcatgaccccaagcgagactgctaagcctcttgtggacaaatttagagttataaattttcaaatccacctagagatacgtctctttccctagtagcagagatcataactttggagggggtgaggaccctctcatctgtggatgtagtgagattcctccaatggctttgctgagcagggtgggctgctgctcaggcatgtaacgctgggactggcagtatcaaagggctctgtcccttatttacttcacttcctcaatgtccagtgtgggtctctttggttcaacaggcttattaagtttgattaaaagaagatgcatttcatgttctattctaggtcctagatcacttcttttgctttgtaagcttcttaatttgctactcctgagtgactttatgacacagctctagcttgtgacgagagagattcctgggtctgcttttagcttccttggtattttaaacttggggaactgatttcttaaggtctgaagtcctagcgatgccttttttttttttttttttttttgctttagtaacacattttagttttcatcacctccctcaggctacacttggccaaaccaaaagtgagcttttcttttgcaaatattagggatgcatatgatcctaatgctatacttacaatatgaaaacagcattccttctttggaagtgaccatagaaatgagtcttcttttcattaacatagtaaacatttgttgggcatttgccaggtgccaggcattaagcaaagatgagaaaacccaaggtctctgtcctcaggaacataaagtccgagggagtagtcaaataatcacaaaaataaatccaactgtaattgtgccaagtgctatgaaggaaagctatatagtgttaagagaacttatagaagacaacctgatgtggtttaggagctaaaggaaggagacagataaaagaaaatatttttctctgagaaagtaatgttcaaattgggctctaaggagtcaggacaacctctgaatttgaaagaagggagagatattctcagcagtaagaacatcaattacagagaacgtgtgatgataagaggtggccttattcaggggactgagtaaaacgagagagctcagaatgtgaagggacatcagaacacaaggcattggagagacagaagggaaccaaagcacgtgggatcctctaaaatctagactgcactaattattttttttttttctcagagcaattaaaagtaacttaagtggggggtaggtgggtagtaacatatcagacttggattttgaggtaatcaacagactgtagacgggcaagatggctgtgaggagatcaaggaagaatctttcgatatgactaggttagagactaaggttggaagagctaaatttacctggcaggaattttctatatctaaatattggctgccaaactaatagattaaaggatgagccattgagttaggttagaacttcacaatgcattaaattatagtcaataatttaaacacatagcaccaaatcataaatctaatacatctgtggtgacaagtagattatgtaaatctacattcatttttttccaagtagctgcaatatattctttacattttaaattattttatttgttcaaaaactcctttttaaatacataataccaaggcatctcccagtataggctgtgtccagatgaccacacacgtctcgtttcatgtatgaattcacaaagcttcactctgaatattttaaagaaccagcagcaaatttataactccagaagtcaaccagccaacaaaaccctctaatatgcttttaatctcctccttgcgaaatgaaagaagacaacttttttttctttgtggaaagaaattatacataaaagctcattttatagcactgagactgtctcattttgttaagagttttatgcaattagacagtaggaaaaattaaagagtttttccagtttcagtgtctctcagacacttctttggtgttttgattcattaaatcccaacataagattattattgccacgttactgtcttggatgatttactctattttattaaaatgggtagcagagagcagaagaataaaaaaagttggtgtacatgacaatttaaaggagcttattctaactgaggattgctaatgattaccagaagcaatttttttttgttcattcaatcactccacaaatataaattgaagtcagatgttgggaatacaaagacaactaacatatattccctgcccacagggacattatgatctaattggatatgcaaacaaacaattgccatgcaaaatgacaatctgaggctgatgtacatatgtcttaggcacttgggaacataatggaataagggttcagtgtccgggttaactggcattcagatactggactcttgagagagcccagtaaagagaacctctatttcccatgtgagttctgaataatttgtttaaaaagaagaggcagatgggcaaaaaatttttccacattcattattaatggaaatcgaattggaggaacaatccggaattcttagccaaatggtcttgctgatttagaaccccaaattagccattttacctctagggcaacttatttcctagaagaagaaagatatgtttgggctgggccagcccagttaattctttcccagtttaccaacagaaatcactatgcctttcctggtgtgcagtgagtatagggacagagaaaagctgaggcatattgcatcaagtgaagctccgtgcctctgaaggaaatgctgagagaaaggaaggggcattcattacccctatcacaactggctgtggttgagaggtcaacaaaggctttacaagtatcttgaaccagctttaaagaaagagtaggaatagagcaggctctagaatggggcaggcaattgggaagcgaattccaagcagagagatcggcatgcacaaaggcatggaggcatgagatagtgctatgctctcaacacccaagagtgattcagcaaagttcatatttagggagaaaggagggcagcaagaggtgagcctgtcatactaaaaaaaaaaaaaaaaattcaaaaaagagcctgatcagggagagaatttcattatgctcaagtcagactttatcctataggcagcggagcgcacctgagataggaggaaggagcaggtttggggaattttcttgaatgtgctatgttcatgcttcctatgagacatgcaagtggagtgagatgtgtaatggcattgggcatagggtctagaattcccactgttagtgtcagtcgtgggccatggcacaaaaggcaaatggaagtactttctatagaagccagaagagttaaaaatgcagtgtagcataatgacaaaaactaggcatgagattccaacaaacctgggtttgaatcctgccacatacgacctatgagatattagacaatcatcctgaaccttgtagttgccatgtataaaacagcagtattaatacctagctaccaggcttgtataaaaaatacatgagattatgtgtgtaaagtattagcacatctcggctgggcgtggtggctcacacctgtaatcccagcactttgggaggccgaggtgggtggatcacaaggtcaggagatcgagaccatcctggctaacatggtgaaaccccgtctctactaaaaatacaaaaaattagctgggcgtggtggcgggtgcctgtagtcccagctactcgggaggctgagtcagaagaatggcatgaacccaggaggcggagcttgcagtgagccgaaattgcgccactgcactccagcctgggtgacacggtgagactctgtctcaaaaaaaaaaaaaaaaaagtattagcatggctctggcacatagtagattcttctttaaatgcctcttcaggatacttagctcatgaaaattcccatttgttggagggacaaggaaacagaaggaaggaacttgtagccagagcaagaaagtggaagtggggcagcagccatgtcccctgtgtaggcaggaggcagggggacaagagtaccaatgcaaggatggagggatggatacccaaaggaactgcctcattcacagctgcttgaggggcagagatcactgtctacagtccttaacacaacttgattccctctgctgaaaattagatctgcctaggctcagctcagcttcctctttgtactccacactgtctctgttaagaaccatagagcacctgtttcatgtctatgaatctgggttggagcaaaaggaaaataaaataaaaaaaactcagagatgagcaaagtattaggcagaagcctaatgggtctggctggagaggaggagtgtggccatgcgctgctgtcagcatgcagctcacaaggcccgggctggctgctgttcttgtgacgttagttgaggtttattctgggcataattagccttttcactccttgtttctttcctgtgttgcgtcctactccatgaaatgttgagtgccagtccttgtctttcatccacacttgaaaccttcgttcatgctaaggtgtaaataaccagcaacaactcagagaaaagtagaaatacacccagacttgaatcttgcagtgtcacctcccctcacataccctcagcagatatgcttaaaaaattatatcttcctttcctaccagttttactttatacattctttcaaaataatggtctggcagctattacaaattaaaaagagttactaagaatgaagaaattcaatgatcatcctggggatagagtgttatctttcatggtgaacatttcttggtaatcatgagaaacaccaaagggatgcagttttaatataatttcaggcaacaaataattatgaaggagatgttttgcatgcagagccttttggggacctctgaaatcctgtctcctaatccatctatgtatattgggcaaatagtaagttctcaataagtgttagttagaaaagtaaatgcatgaattgagtcctggtaaccataataaaaacagtctttcttgtggaaatgtgttggtgattatggactggaccagctgcagcaatcaaacagaaattagagtcttaatagacaacacacgagcatggcaccccagagttggacagaaattttctgtgctcactgggaacttggctctgactctggtttctctgtcacagattttggggtgggagagtgctcccatggggaaagcagcacgtgctgatatcgaaattgaatagaaccttggctgggctaggagtcattgctattttagtcacttccagatgtctgctgctgtagttttaagggacagggaaagatgagtggagtgtggcatgccactgggtaaaagatgaggagcgttctccttctaagcccttcaagttgtatttaaagccatccctcaatatgctacaaagatggattggataaagcctttaaaaactgtgttcttctattcacaatagcaaagacttggaaccaacccaaatgcccatcaatgatagactggataaagaaaatgtggcacatatacaccatggcatactatgtagccataaaaaaggatgggttcatgtcctttgcagggacatggatgaagctggaaaccatcattctcagcaaactaacacaggaacagaaaaccaaacaccacatgttctcactcataagtgggagttgaacaatgagaacgcatggacacaaggaagggaacatcacacactggggcctgttggggggttgggggctaggggagggatagcattagaaggaatacctaatgtagtgacaggttgatgggtgcagcaaaccaccatggcatatgtatacctatgtaacaaacctgcacattctgcacatgtaccccagaacttaaagtataataaaaagttaattaattaaaaataaataaacaaaaactgtgctttttaacattcatttatagatttgacttcatatatatcaaataggcaaactgcagaaacctttgtgaactaatcatgactctgcctgccccaactagaaaaacaaaacaacacaaaacaaaacaaaaccagaaccattcttgggctttggttatgatctagtatttatgaagtgccagccattaaacatatgttgaatggtacctatgccagatgagctggctgcccccagtagctattgtgctaacctaacaagctcaccagatgcttgttctatatctgctttctccttttatgatattttcggtgtgtcttttaatcccaaaattgtcattatgaattagataaaagatatcaggtggggggtgaccccctctgaaatattctcaaaagggatgcctggggttctttccaagaggccctgtcaccaccagggaccagtctagggtatagatcaaagtctgtgatgggttcatagagtttcttgtttctttcctttctttcactgagaaggtatggcactagcatgatataactcttgctggataaagaaagcacaggagaagcagtatagtgcagtggttaagcatataggatttggattagactcaggtcaagttcagacactgtcactcattagtcatgtgaacttggacaaattacttaacctctctaaggctcagtttcttcatctgtaaaataggtatagtgatagcagctattgaatttttgtgtgtgcaggagaggggaaaattatggtaaataataattcctcccttgtccaacaagattgtgagctcaccggaaatataacaaagggtaagaccagtgaaggtcaacatgccgcctttattattgttaaagctgacataaaagaatgtagtgtctttatggacaagtgaacttcacagccagacctctctgccaggacaggcctctccttgcaggagcagagcacagcatgttccctctcaagagaaggaagagatgtccgcatgtctccatccatgctctactgtcaaatcagtcacttttccccgaggctagagtgaggcagtggagggtggctgggagtgttatgttaatgggtcttcacttggaagggaacgtcaagagttggagatacgattaccctagtagcagcaacttcatagtgttctcctgaggattctgtgagataaaataaggtgtttggcaagtgctaaatgttcacgaaatgtatacggtgatgttacttgtcacagcaaccattatcactgagtgtcacatctgtggcaaggaaatagggcaatgaaaaacagagacatttggaagttgtggtgttgtcccatgagggttaaataaagagttcaggatataatctttaaaccaaacaagagattaagtgtctatacttagcatgttctgttattgtcaccctgggacagaggaacaagcatgaaggtttaagacatgatagaaggagattggatttaacacaagtgggaagaagcagagatcttaactagataaatgtgaaacaagaagatgtcatgcacctgggagctgggagatcctcccaagcatattctcctgggatgaagatttctgggtcttggggagttggtcaatccatgtcttatcttagacatgagattagctcacccactccctctgcttgaggtttctactagctgtttatccccaaatgttctgttggatggcatcctagtcagggttctccagagaaatataaccagtagaagatatgtatacacacatacacacatatacatatatatatatataaaatttattatatcaatctagtatttatataataaatttattttgatttatcattattattacttaaatttattatataaatctttatatatatatatatgcatataaaatttgttgggtttttttttttttttttgagacggggtctcactttgtcacctaggctgcagtgcaatggtgtgatcttgggacactgcaacctccacctcctgggttctagcaattctcctgcctcagcctcccaaagtgctagaattacaggtgtgagtcaccatgtctggctgatatatataatttataagttaatataaataatagatttactacagatataaaaggagattcattttgaggaataggctcacacaaccatggaggctgagaaatcttctaacctgacatctgcaagctggagatccagagaaaccagtgctgtaattcagtctgaatctgaaggcctgagaaccaggggagccaatggtgtgaatcccactctgagggcaggaggagatgagatgtcccagctcaagcagtgagtgaggcaggagaaaaaggagcaaatccctccttcttccttttgttcttcctctttttgtcctcagtggattaaatgatgtccagccatgctggggagggcaatctactttactgagtccacctatttaactgctcatcttatccagggacaccctcccgggcatacccagaaacagtgtttgatatggacaccccatggcccactcaagttggcacatacaattaaacatcacaagttggctttattttttcttaaactgaaaaatgcagatacaggcctgtgtggcccagggaaacccagacctttggtatttacctgtgattcattccgtgcagtcccgagttaagcacacaagttcctctgagattatttggagattttattttgttctagttcttaaagagtacaatatttaagaaaatttgccccatattttgaaagcaatagtttttcagatctctgttggcctctgatttgagttaggcatgatgtttgtttaaggcaattttctaaattacttctcttaattcttcctctaggaattagcatctacgacatttctactttcttttccacacctccactctcccccacttcacttcccttcttcagctgtgagtgtcaaagtccctgggttcgtataaatgatgtcaaaggcaaccaattgggttttctaagattcagggttgactcacctgatctcaagaggaagccccatattgacaagtgattatcttctcatttcacaaaacatagttattgtcagagagaagtaagaggggagctggggagtggatagctgtagtgatacagtaacagtgcttcaatgctgaaagtgaaaaacacagtgaatgtgaggaagagaaaaggtgcatattataaaggaagcagcatcagaatatgccaatgttctgagaataaagagggagttattcaggtggctttgagagagggtgatttcaaccctggcagataatttttaggaacgagaatctaatgcacaagtaaacatgcttgttatatgggaatgctgtgatagtcttgatgaatgggaagtgtgcagatgagttccaatgtcatcccacctgctctttgatatttgtgaagtgagagctgagacataacctctgtggtttaagaagaactgatctaattatggtcaggtgattggaaatggaaatctgccacagcactttgaggaagcatttttcagatccccatcccctagtattaagcaaactcttaaaatcgtaaatctaatgataccacgaaatgtgttttgatgtttaaatcaaagggcatttcacggtaatggctccacagctgagcaagcctgtatttgcttaaaaattttatctatttagaagtcactgattttcaaataaactgaaaagctgccaatcaacatggcagctgaaacattcactttatggagcaaaacaatagggctcatgtcagagctgtgacccaagtttgaaaattaatgtcattttgttatttctcttaagagttgatcttttcctttgagttgctcttcacgacaactgctaagtggctttgttgttggatttcagggtttggcacaatattccgttctcttttatggctattatgacaataaacgaacaattggatggatgaatttcaggttgccgctctcctattttctagtggggattatgtgcattggatacagctttctggttgtcctcaaagcgtaagtttcatttgtcttttgggaagcaaataatgatttctggaatcaaatggagggattaatttggggattggatataattttgttgctattttatgtctaaaggaaacagagtctgtaagagatgaaatgtagttttaataccaacactaatgttagactattacatcttcaaaagaactgaacataaacacaggcctttgagtcatctcatggggtcagaccaatgcttgcatgcctatcttgtgtttaaacatattttttaaatgtgtatttttgtacttgaaggtgtgaattaatgttgccagcaagacaggaaaacagctgctggtctctcttttgcgtgcagagaggtttgtaacttgcagaatcagctcaataggcagaatctattgttctctgctcattttttaaaaaaaccagaataatcactcattcaaaaaattttagctgtgtaagacagcaaaaatgaatggtccccaatgaaaccatcacaatcaactgtataatcatggtttgtcttgggaaaagatttattggagtatggggaagaatttcactggagaactgatattactgcagttcatttttctccctgcctaaaattatttataatactccacttaaagactgcagaagcctagcagagttatttgggtttatatattaaaaaaatgaccctttagccaattttttttgaactagtttacgagaagagttgaaacatctcaagtaaggttgccattcttttatttgactatgtgcaagttgaatgagcttttcccctcattgtaggaggtccctcagcctgagggtctaagaggggaaaagtgcaaagtcaccctaagcaggagctctctgaagcagtctgtgacacactttgtgtcctaaacctgcctcacttacttgttcctccagagaaaactgccatatttcatttttaagctcttttaggacttaaaaccttataggaaatcctatatctaagatatttatcaacctgctaaagtgtaatcagagacctcaaatataagagactgtccatcagataaactactatcacattccaaaaatcgaagatattttctagtcttttgactatattgctctggttgggctgaagtcagaggtatcatttacattactgaggcctcatgagtatcatttctgtgttgctcctttagtttctgtggtcagtggagaagaatagtttctcatgtctgatgactcagcttttattccggtaactgtgcaggctgtgtaccccacagccattctgcctaggttcaaatcccagctctaccatgtatgtatttatacaatcattaacagatggctcaactgctttgttctcctgtttccccttggtaatagaggtgtaatggatgtgaggactaaatgaattaatacaaacaaagcacttagaatatgcctggatgagaaaattattcaacaaatgttaacaattttattaggctatattttattaggctatattatattttattagcctataattcataggcttatttaagaaaaaaagccagcatggtaggagttgaggccacattatagatccccaaaacaaggcagtcatgtatggttatgcagttgtacatcagtagatttgtatatttaataaatgattttctggcagatgaatttaaagtatctagagcagcattgtgccaggcaagccacatatataagtttaaaacttctagtagtcattaaataaatagacaggtacatttaattttaataataaatatatttgctttaactcaatatatcaaaagtattatcattttaacgaacaatcaatataaaattattattgagatattctctgcctttcgaaaggtatcaagtctttgaaatctggtgtgtattttataccagtcgcatttcaattgttcagtagccagatgttgctggtggaacactctgttgggtagagtggctctagaggaagtagtggctttttcaaagttgctcgaagatgccatttgggatagctgcagggcatcaaatccacattttccccctcaaagtcattcatgttatatcatccaaaccagtgtggccttgaaccttccctctggcatggacctttggctgctccttacctggttaacaagtagttcaaactcattgcccaaacagcaagacaactcaaaaacaatacaccactctcactccaccaccagcccatgggagaatattcagtagaaaaagaattgatgagatataaatctttgtacagaatcattaatcatctcttcctactcctatcccagtcaaatattctcttggaataagtttgagcggatttatgacatacattactcaaatggaatagaaggtaacctaagttctaaaatcgactaggctacatcaagattttttcactgtactcattctgttagcgtctgcatactcatccacaaaatgggagcaaatatctatttttagttacttaatagcaaaatcagaaaataaaaagatagaaatccaagaaaatagtttgaaattttaagataagatgactaactttgttggcccaggattctcctggttttagaactgaaagtcttgcatttgagaacctttcagtccccaacaaacatggatggttggtcaccttggttttaagtccttcccttttcttcttcctcccttcattcatttcttttatcctttttttttttccttttctttccaggtcagtgtacattttcaaccacatcatatgcttagaaatcttcatgataaatatagttacataagtattaaaagcaaattaaaacagtataacataaagttacacaacatggaaaccatcagctcatttaaatattgtcctcattagtttgaagttttatatcataaaataaaggtggcttgacatcagaacccaactgttcccgttaaaaacaattctctaagctaaaaatttggggttttactggtctattttacagcagctaaactactggaagcagttgaatcattttgagaatgcatgtcttaataagaaactcatagctattttatccttgtaggctttttcaagactttttcctgtttgtaggatgttttagtccatttcgtgttgctataaaggaatacctgaggcttggtaatttgtaaagaaaagaggtttatttggctcacagtctacagactgtacaagaagcatggagtcagcttctgcatcaagtgagtgattcagctgtttccactcctggtggaaggcaaaggggaaccagcatgtgcagagatcacgatggtgagataggaagcaaaagagagatggggaggtgctgggctcttttaaacagccagctctcgtgggagctaatagaataagaactcacttactatcccctgcaaaagaaggcattaatctgttcataaagaatcttcccctatgacccaaacacctttcattaggctctacctccaacattgagatcaaatctctacatgacatttggggagacaaacagcgaaaactcagcacagggctccctgggattagatataatttttctgtttatgatcctggctataataatactcatagaatggactaacaaatattcttggatacttaaatcatgtgctatacgtaacccttaaatggtgtcaaaatttttgtctacatagactataatatagattatatatatatgagatatatattataaactacatatatcacaaaccaacctcaacacatgcagataaatatttttaaatttggcaaaatgacagtatgttcatccatatttctggagctgcaacaataattataaattatacttgaaataataataattaacatctgttgagcatctctcatgaatcagtttaaattacattacttctaatccctaaacattgcaaagtagctattagttttataattttacagataatgaaataaaactcagagatcctaaatgaactgcacaaggtcatttgactataagacctctttgaatttagagttttctagttcaaaagatatcttctaccccttacaccttgccacctctctgtactgtgcttctccttacgtaggccaaggtgttcctcccaccaatcttatatactgtgttgagtacccattagttattcctattggatggatggagaaattaaggctcagcagagtttgaggatttcactaagttcaaatgcccagtaatttgcataactgaactttgaacaccttgctttaatttcagcacttagcttttctaatttctgatgtggattcatctatattgatgataacaatcatcaatatagactgatgtctctgtctcgtcctgggtagcctttttatttttaaaaattctgtattaaaatagtttcttgtctgttgttaaattcccttagagttttatggccttgatgtgactcatgtgaccaaacgttttgttaaaaaaaaaattaaacttatcaaaaccaagtccttgttctacaagactcttgcatattccaagataaatcatggccagcttcacacacaccatttctaaatcaacgagactttattttcttccttctacttagatgtcagtgcctttgtccattttcttttcacttctttggtacatgtttacccagacagttatgacctacctgatactctgcctaaatatcttccatgtctcttgacatccttaatttcttaacattgaaattgtttctttttcctccccattttcccacccccaattaatttttttctttgtcgaaggaatttctccttatctatttagtagaaagcagtcagagtgcctcatagaccccagtctaatattttacttctcagagatattttcattggagatcataatgtttgatgtatgtaatgatgaatttcagaccctagagaaagttatggaagggtaagtggacctggcctacagggcatgatattctggcaaatcccacaaaacatatggttatctcatcttcctcaaactatagttgaccttatttcaaaaatgcttggagcagaaaagcaacgaggtatgaaagacatgaagtcaccaccttccattttatattactactctatgaattgcatctagattttaaaactcaacataaaaaactgtcttcttgcaagcatggactaataaggatagtagtagttcacaaagaatggcagctatttacaaagtgaggtgatattgtcaaaacctatcataatgacaaagacagaactaaacagtgatagaataacaagcatatgtggtatgcatttattatatgtattgtgccatgcaaaaaagcaatttatgctgtatgtatttacttggtgaggctctttccagtgctaagtttacttctagaatgacaattcatgtattcattcatttgattactatttgtggaacacctagaatgggtaatctaagagaactatccagtacctgggtatttcatggtgagcaaaataaagtccttgcctctgtggtgctcagttggggaaatattgtaaacaaagaaatgaccagtggttttggccaatgtagtataattttatgttgttgttatcctctgcagtcaaatatttgctacagcttcttcatcctcaagaattttaaatagttgagaagagccaagatggctaacaagatgcagccaggaagagcttctcccaatgagaaaccagggtattaagaagattggcacactccaagtagatcttcagaagggaggcattgagagtggatggaggaaggatgtagactctgtgctgaagttagaggaagcttggaatgctatgctcaggaatgagttctaggactcattcctggctccgagtgtctcctaaggaagggagagttaaataggcgtggagtagcccactctcaccatggacctccataattctagctgcaggagtctcaatgacccccatggatatttgaactgatagggggagctgcttgaagagttgacagggacaggactgcagactgtgtggagttcagaggatttggcaaaggaaggactgcagtagagcacagccaaggacacccatccctgaagactcaccatgcccctgtaggctttggcctttgttgactgtcagaccaatacagagcagggctgtcttgcccatggaatgaggccattctgatctgagtgcctcccttgtctgccagcctttcctgaggttcatgccaggctgtgcccacttgcagcacaggcttggatgtccaactggggcacttcctaaaggccatcatcatagcttctttgttggcagaccccacccaactgttggagagcttctgaagacaagcctccacccgcacacaaccacctgcagcctcccccctctgctttgccaacacgcaggtatgcatggaccctgctgctctgctgccaccaacacatgagcacagaccccactgccactgccccgacaaagcactgttgccagcaaccctcatggagcattgttgttaacagactggaaacacctcagctccttcagcacagcaggtgtttaaccttgagaggccagagaacaaagctgtgtgcctggtcctataccactgggttacagcacacagtccaggagtgctgagctgagcccaggtcccctgaaatcagccagaaatgaagccagttgactagacctaacttatatcacagtcaaaacctcaaaggcatcaaagaattgcaactttaaagattaaagaaacatcagctcacacagatgagaaaaaaccagcaaaagaactggggcaactcaaaaagccggagtgtgttctcacttccaaatgaccatgctagctccccagcaatggttcttaatcagactgagatggctgaaatgacagacatagaattcagagtctggatggcaatgaagattgttgagatttagtaggaagttaaaacccaatacgatgaacctaagaatccagtaaaacaatacaagagctgaaagacaaaatagtcattttaagaaccaagctgatctgatagagctgaaaaccccattacaataatttcataatacaattggaagtatcaggagcagaacagcccaagctgaggaaagaatctcagagctcaaaagtggttcttcaaattgactcagtcagacaagaataaaaaagaaagaataaaaaggaatgaacaaagcctccaagaaatacagaattatgtaaaaagaccaatcctatgactcactgacatccctgaaagagagggggagagagaaagcaagttagacaacatatttgagggtactgcctatgaaaatttccccatcctcactagagaggtcaacattcagattcagaaaattcagagaacccctgcaagatcctataaaagatgaccatccccaagacacatagcccacagattctttaaggtcaatgcaaaagaaaaaatattaaaggcagctggagagaagggaaagacatctataaaaagaacccatcacactaatggcagacctttcagcagaagcagtacaaccaagaagagattagggcctatattcaccatcctaaaagaaaagaaatttcaactaagaatttcatatcgagcctaactaagcttcataagcaaaggagaaataaaatccttttcagacatgcaaatgctaaaggaattcattactatcacacttgccttacaagaggtccttaaggaagtgctaacatggaaataaaaaactgttaccaactaccacaaaaacacacataagtacatagaccactgacactataaagcaactacacaatcaagtccacataacaaccaactaacaacactatgacaggatcaaatcttcacatatgaatattaaccttaaatgtaaacgggctaaatgccacattcaaaaggcacagaatggcaagttggatcaagaagcaagaaccaactgtatgttgtcttcaagggacccatctcacatgcagtgacacccacaggctcaaaataaagagattgataaaaatccatcaagccataaagagattgataaaaatctatcaagccataaagaaattgataaaaatctatcaagcaaacagaaaacaaaaagagaagagcctgttatttttattttaaaccaaacagactttaacctaacaataatcaaaaagggacaaagaagaggattacataaagataaaagattcaattcagcaagaagacttaactgtcctaaatgtatatgtacccaacactggaacacccaggttcataaaataagttcttgacccacaaaaagacttagataactacacaataatagcaagagagttctgcaccttactgacagtattagacagattattgaggcagaaaactaacaaaggtatttgggacctgaactcaacacatgaccaaatggacctaacagacatctacagaacactccacccaacaacaacagaatatacattcttcttatctgcaaatgacacaaactataaaatcaaccacatgctcactcataaagcaattctcagcaaattaagaaaaactgaagtcacaccaacaacattcttggatcacagtgcaataaaaatagaaatcaataccaagaggatctctaaaaatcacatgattacatggaaattaaatagcctgctcctgaatgacttttgggtaaacaatgaaattaaggcaaaaattaagaaattatttgaaactagtgagaacaaagacatgacataccagaatctttgggacccagttaaagcagtttaaaagggaagttatagcactaaacacccacatcaaaaagttagaaagatctcaaattaacaacttaacatcacatgtagagaaaccagagaaacaagagcacaccaaccccaaagctagcagaagataagaaataaccaaaatcagacctgaactgaatgaaattgagacacaaaaagccatacaaaaggtacataaatccaagagttgtctatttgaaagtataaataagattgatagaccactagctagattaataaagaaaaaagaagattcaaataaacacaatcagaaatgacaaaagggacattaccaacaactcaaaagaaacacaaaaaaccctcagagattattacaaacacctctatgcacacaaactagaacacttagaagaaatggataaattcctgaaaacatataacctcccaagattgaaccaggaagaaattgaaaccctgaacagaccaataacaaattctagaattgaatcagtaataaaaagcctatcaaccagaaaaagtcctggaccagacaaattcacagccaaattctaccagatgtataaagaagagttggtgccaatcctactgaaactatttcaaaaacttgaggaggagggatgcctctttaactcattccatgagaccagcatcattctgataccaaatcctggcagagacacaatgagaaaataaaacttcaggccaatatccttgataaacatacatgcaaaaatcctcaacaaaataatagcaaaccaaatccaccagcactcccaaaagtaatttaccatgatcaagtaggctttattcctgggatgcaaggttggttcaacatacacaaataaataaatgtgatttatcacataaacagaatgaaaaacagaaactacgtgatcatctcaatagacgcagaaaaggctttggataaaattcaacatcctttcatgttaaaaactctgaacaaactaggcattgaaggaacatacctcaaaataatgagccatctatgttaaactcacagccaacatcatactgaacaggcaaaagctggaagcattatccttgagaactggaacaagacaaggatacccaccctcactattcttattcaacatagtacgggaagtcctagccagagcaattaggcaagagaaagaaataaaaggcacgcaaataggaagagaggaagtcaaactatctctctttgtggacaatataattctaaacctagaaaaccacatagtctctgcccaaaggttcctagatctgataaataacttctgcaaagtttcagaataaaaaaccaatgtacatttctatacagcaatattgtccaagccaaaccaggaatgcaatttcattcataatagccacaaaaagaatataatatctaggaatatagctaaccagggaggtgaaagatctctacaatgagaattacagaacatagcttaaagaaatcagaaatgacacaaacaaatggaaaaattccatgctcatagatgggaagaattaatattgttaaaatggccatattacccaaaacactttacagattcaatgctattcctatcaaaatacaaataacagtttttagagttagaagaaactatttaacattcatatggaacccaaacaccctgaatatccaaagctatcacaagctaaaaattaaaaaaaatttaaaaagctggaggcatcagaatcacactacctgacttcagactatgctacaaggctacagtaactaaaatctcatgatactgatagaaaaacaggcacatagaccgtattagtcagggctctctagagagacagaactaataggagatatatatatatatatgggagcttattagggagaaaggctcacatgatcacaaggtgaagtttcgtgttaggccgtctgcaagctgaggaaggaagaagccaagagtggctcagtctgagtccaaaagcctctaaaacagggaaaccgacagtgtagccttcaatctgtggctgaaggcctgagagcccctggcaaaccactggtgtaagtcccagagtccagatgctgaagaacctggagtctgatatccaagagcaggaggatgaaaggaagcatctagtacagcaaaaagatgaaagccagaagactcagcaagccagcttaccccactttcttccacctcctttgttttagccactgtggcagctgattagatgatgcccacccacattaagggtgggtcttcccctcccagtccactgactcaactgtcagtctcctctggcaacaccttcacagacacaccaagaaacaatattttaccagctatctaggcatccttcaatccaatcaagttgacacctaatattaaccaccacatagaccaatggaataagttagagaatctagaaataaagctgcacatgtacaagaacctgatttttgacaaagttaacaaaaacaagcaatggggaaaggactccctgggtcatacacagcattggaataactggatagccctatccagaagatcaaagctggactctttcctttcaccagatacaaaaatcaactcaaggtgggttaaagacttaaatgtaaaatcgaaaactataaatttttagtttttaaaactaatctataaaaactcttgaagaaatcctaggaaatactattctggatatcggccctggcaaatccttcattaagaagactccaaaagcaattgcaataaaaaccaaaattgataggtgggacctaattaaactaaagaacttctgcacagcaaaagaatttatcaacagactaaacagacaaccaacagaatgagaaaaatatttgcaaactatgcatccaagaaaagtctaatatccagaatctataaggaacttaaactaaccagcaaaaacaaaacaaaacaaaaccctaaaaaaccattaaaatgggcaaaagacatgaacagacacttctcaaaagaaggcacacacggccattaagcatataaagaattactcaacattactaatcattagagaaatgcaaagtaaagccacaatgagatactatctcacaccagtcaaaatgactattgttaaaaacaaacaaacaaacaaacaaacaaaaaacagatgctggcatgactgtggagaaaagggaacacttagatgctgttggtgggaatgtaaattagttcagccactgtggcaagcaatttgaaaatttctcaaagaactcaaaacagaactaccatttagccaagcaatccaattactgggtaaatatcaaaggagtagaaatcattgtactataaagacacatgtactcatatgttcaccacagcactattcaaaacagcaaaaacatggcatcaacctagatgtccgtcaacagtgtactggatgaagaaaatgtagtatatatacaccatgcaatgctatgcagccataaaaaagaattaaattatgtctttgcagcaacattgatgaagctggaggccattatcctaagtgaattaatgcaggaacagaaaaccaaataacctcatattctcacttgtaaatggaagctaaacattgagtacacatggatgcaaagaagagaacaatagacaccagggcctatgtgagggtggagagtgggagcaaggtgaggattgaaaaactacctattggttactacgctcatcatctgagtaatgaaataattgatacaccaaacccccacaacatgcaatttacccatgtaagcaacctgcacatgcattccctgaacctaaaataaaaattagaaagaaaaaaataataattaaaaaaattatctgggggaaaaataatttacattagtagcaccctcttgtcttcaggggatatgttctaagacccccagtggatgcctaaaactaaggatagcaaattctattgctgtcagttggaacatgtttcttttcatgtcttcagtccacatatttaatgacttttccactttaactaaattttaatcacacactgtgaccatcacttttacagtttgaggtacaacagcaaaactatcattaatttcttttttcttcttcacaatttcatggatagaagatttgttcttactgtagatcttagcaacctcagtgtatgattttcttttccttccttattaggtcaaaaacttttgccttttcacttaaaggaagcactttaagtcttatctgtggcatatctgaattgccagcatcactgctcttgcactttgagagtattacatgaaataagggttacttgaacccaagcattgccttactgtaatagtaagtctgataactgagaggactattaacaacatgggtatactattgtatccacaggatgcatccacactaaacaaagggagaattcacatcctgggcagggtgaagtgggaaggtgaggaatttcatcacagtactcgaaacatcataaaacttaaaacatgaattgtttatttctagaattttccatttaatatttttggaaccatgaattgatcacaagtaactaaaaccatggaaaagagagaactagtccacatgttgtttagtatcgctattacagtaattttctttttcttgtgtggtcttatcctgtgggcttctagaaaattgtttcctacctgcctctcaatccccttcctcttctcaactttcattttagcagaggctacattatagtgaccctgttggtttaggatttaaagaggcatttatttgatttgttaaaaacctccacatgcacccatgaaataaccaaatgacctcagggtataaatggagctgcaaacttgtccaagtcaagaaattcagtataaaaaccttaggcaggccaggcgcggtggctcacgcctgtaatcctagcactttgggaggccgaggtgggtggatcacgaggcagaatatcgagacaatcctggctaacatggtgaaacctcgtctctactaaaaatacaaaaaattagccaggcatggtggcgggcgcctgtagtcccagctactcaggaggctgaggcaggagaatggcgtgatcccgggaggcggagcttgcattgagccgagatcgcgccactgcactctagcctgggcgacagagaagactcctcctcaaacaaaaacaaaacaaaaacaaaaacaaaacaaacaaaaagaaacaccttaggcaacaacatatatgctagaattgcctttgctaactcccctggcaaagcaaatgatgtattgagattgcttctcagataaggtggttgaaaatgatagcaatcttaaaaaatgagcagttttcataaatttgtatacattttgctctatagacaaagagtagagcttatagctatcatggccatatctcaataaaaatgtgttgcaagcaggtttgccttgggcatctttccttattcctttcagtattccacttcttttcacaccctttcccacatgttagatgttcccagtctgctcattcagttcgggctcccttccctgggaggctgtcttcagctcaaaactttgccagtgataaaactccattcaaaacttatctgccaagtggccatttttacttgaagccctgcccttggtcaatgacagtgcaaaaactggatagtggcatattaatcaaataagtcattttctccctaggttaaaccatagggaatatctgctttcaacccttttggcctccaaaaaaaaaaaaaaaagcattttgtatggcttttcatacctcatggtgtcctagcttgagcactggagcaaagtcagaaaatctgagcccttgacttatctctgtggttcactgctggataatgtccagaaaattatttcatgcctttgagcttcagcttccttatctgtaaaaaggagagtaactaccttgacttcttgctgagattttaaagagaacaaatgtgaaagcacacacaatcaccatttgcaaagggtaaagtggtagatggatgaaaggaataatgatctgtaatttttccttacatgctagcctatttaaaatgtatgagcctccatgataagtgtggctaatagtgggggaatgtagatgatctagagataccggtcaacctacaatgtcagctttatgtcattgtgcccctttcttctttggggtttatatgactataatattttaaaaaccaaaaccttatgggaccattttataatttgtgtcatatgaaattttaattttgctatttatagtgaaagggaaaaaaggaagtggagtatataggatatagatctctaaccactaaaataaacctgtgagtaaatgcattttaagctcttcatgcaaatacatatatatatatatatacacacatatatatacacacacacacatataattactgattaaaaatatatataaaatcacatatatatacatataaaaccacttggcattcaggttgtataaaaatgttgatttttattcaagaattgtagagtagatggaaatttaatgtactcaatgtaatctctatttgggatgagattctagggggaattaaaatttacataggagtttctttgcctggtttagtccatccagaggcttcagatggtctgggaaccaactaaagttgtgtggagcaatgtaaaagtcagtatatatgtttcttttcccctggggagggattcaatagatttcatcgtattcttaaagaaattcttgtcctaccaaaggttaagaactaattatctcagttaaacaaaacacataaaaatatgtttttatatacatgttgaattattcaaatcttcagtgcttagtagtttattaatcttgaaggcctagaaagtgaataatttcaacaactgaacaaaaataaaatttaaaaagaaactattttctggtcattagaacaaacttgttataaaatatatgtctttttgctattgcttctccacttcaacactcatgatcatgttttgttgctatttcccctatctcattttttctggctgctgggttaaacttcctgtttttgcagaatgaccaaaaacattggtgatgatggaggtggagatgacaacactttcaatttcagctggaaggtctttaccagctgggactacctgatcggcaatcctgaaacagcagacaacaaatttaattctatcacaatgaactttaaggtagaggcaccaacttcaaaaacctgctgtttgtatttctaagagtaaaattggaggcattccatctggtccagtagtgcagtatcttgacaatttacatgaaagattaactcatggtttctgcctaccaagatcttgccatggttctgattataactggaaaatcttccatgacccacaacagcactattattccttaaacacttctcttctctaaatctggtaataaaataatgttactggattgaaataggaccatgagtaatcagaataagatattttaaaaactagaacaatgttcactaattatttacaggaataagcataatattgaagtgaccctaaaacattattttgtagttttttttttaattcactggaatgaagatttttagagtgaagactatcctaatatcagagcaatcacagtttgtttgcaagaattcttccttctgtcttacttgccatcgtttgttggcaatattcacctggtttgtggaatctcagatttagtttacattgtcattcctcacattctgatgattgtaaaaataacttttgaggttttgatacttttaaaatgtagctaagatattctattttgggtttttgtttgtttgtttgttttcatggatacaggaagctatcacagaagaaaaagcagcccaagtagaagaaaacgtccacttgatcagattcctgaggtttctggctaacttcttcgtgtttctaacacttggagggagtggatacctcatcttttgggctgtgaagcgatcccaggaatttgcacagcaagatcctgacacccttgggtggtgggaaaaaaatgaagttcgtctctgcatgctttttatgtgcttagaacctgacatttgtttcttttgtgggttatgtttctttgatggaacatttaaaaaggccaccctttacctatcccctatcctgcccttacagttaaccaaccctgttgctcattttccattctattctagtcttatttctaaatctggactgtctgtttttcattttgtgacatgatggaaagttagagtcagaaaagatattaaaaaacacatagtctaatcattatgttttacagatgggaatgataaatctcaagagattgcattatatgtttatggtcacagagttaggagaagagtcagggtgagaacctaggaatcttgacttcgagtccaaggctcttgctgctttctctgcaaatccttcatctgtcattaaaagatcaaattgttgcctgaactttttgaagcagccatgataaagccactgattcctatgttgatctcactggaaacactcagattgcttctccacctttgggcatgtctgggcttccctctgttttcattagaagcctaactgcagcatctccatctccatttcctcctgtcctgtaccttactttctctccctctaaatgctattcaaatgaagaaggccagctcttttccaggaattaaacattatgaccgtaatttgcctttagagtatctgcccatttagtgaatcagagaaaggaggttagacatagatcatttagaatcagaaaatcattggtcatgagttgttgctagagtctgttcccgttcataaaatgcttatgtgtatgatgtgacgtcattttgagcttgggcattttcaaagtatgtgcagatttaggctgtgggaagtgtagacttcccacactgaaacttttgcagaacagtatagatcaaaagaattaaaatatgtctttataagcatagaattttctaaaaaatcttggacagcaaatgatataatctacttacagaaaaaggttccaaataacattctgagtatttcagaagtggtaccaatagagacgggactagatattttaaagactttaatatacagtcatgtcataaaaacttgtaaaatataagtaatttagcagagggcttttatttatttaaaatgaaaaatgtaggaacacctcaaagcatttactaagtttgctttcaaaatggtctcataattgtaatagtacatagaggtaacattatcatgcagctttggtccattatttatattggttatgtttttgtataaataaaccatattaaaggatgggtagttgattatcaataaaataactattctttgtaagaacctctttaacatatattttagggaccctctgagtcctaggggccaatgaaggtaataatggagattcatgagtaactttacaaatttgataaaaccaaatttaaatttgccttgcataagtttgcacaggataagccaaattttctttacattagtctaaaattatagcatgctgattttgtattatgtcatgctgagatttggatcctgttggtcatacttatataatgttttaataaaaatgacaaaaatctaatagcaattgttttctaaatatagtctggtagttattataattattcacaccacgaagtccacaggagaaaataggaaatgtttagtggtgacagtttgagccgggtatttgggaaaggagatagtcaccagagttacctaaaatcggtatttccctattagaaaattagtacatgttttggattctttttattgacttcctttagccaaataatatcatcataaggttgccaaacatccaggaaataaaaagcacatgtttcctacttttcatgtttctattccttcttctttctctctcccccctctccccacccctgcattattctcttgtctctgaaattatagcccattctttcacttttgaaacttttctacgttggcttccataacattatgtcatgtgttctccatttgtttctctgagttccttctgtttcctttaataaaactcattgtatgtgtttatgttttcggccttaaaagtttacatttgccaaaattcaatatttaggcctaggcccatctcagggaattcatccattctaactgattaaactagcccatatgctgatgattgtcagattagaattttcagtttgaacctcctcctcaagcagattattttccatttcttttggaaatcttgttgtgaagtgcatcaccatatcagaatcagttaccacatagaacaatatgtgttctctgtgtagagactgatgtaaattgccaccttcactataccaggaaacagactgttactactggcacatacacacactcagtcacatgcctctcttgagaatgtgaattgaatattttccctgtcattttattgagatcaaattctaaacgtgcataaaatagtcatttttagtcttaaaaaagatcaaagaagcctagctcagaatcttccaaaattctggcaaaaagcaataataactttaaacaccattaacctagtttctcccttgtgcctccttgtagatgaacatggttatgtccctcctagggatgttctgtccaacattgtttgacttatttgctgaattagaagactaccatcctctcatcgctttgaaatggctactgggacgcatttttgctcttcttttaggcaatttatacgtatttattcttgcattaatggatgagattaacaacaaggtaagccttgtttctggattgtccttgccataagagtgttgttcaattcccagtctcaagtttgccagaaatgcctttgaaatctctgttgtcttcattttagtttctatctctttgctttctagattgaagaggagaagctagtaaaggccaatattaccctttgggaagccaatatgatcaaggcctacaatgcatcattctctgaaaatagcactggaccacccttttttgttcaccctgcagatgtacctcgaggaccttgctgggaaacaatggtgggacaggtaatgccaccaacagaagtgtatggcaattagtagattaaaaaaagagagtcaatatctcttccataagattggcttttaaaaaattgcttattagtaaaaatagctaagatttgttgaatgttgactgtgtgctggctctgaatttcatgtatattatctcacactgtttgcaaatctatcccttgaggtaaatactatttgtatgtcccctttacagttgcatataaaggaaggatagttgaaaatggtgcaaagagatgtttactatctgtattataataaagcactcgatttagatacaggccaaagcaaatatttaaatggaactctatttagtgttacttgtttgctgtaaaacaaaacaaaacaaaacaaacaaacaaacaaaaacagagtcttgggggtggccaagacagccaactagaggcagctagtgtgcatggctctcatggagagaaatagaggggttgagtaaatatagcaccttcaaccgaaacatccaggtacatgcattggatctaatcaaggaaacaacttgacccatggagagcagagaaaagcaaggcagggtgacagcccacctggtagtgacatgaagccaagggatccttctatgcccagggaagtggtgagtgaatgcacgaccttgggaacccatacttctcccgtggatctttggaacccttgtgtcaggagatatcctcatgaacccactccacctgggccttcagtccgacacacagagctatgtggagtctcagcagagcagccacttaagcacatgcagagacccgggagccttagatacctgggcttttctttttgggcttcctgtcaaaagtagctatacctctggcaaagcaggaggttagacccccaaccacaccccttagaaaaggggctgaatccagtgacagtctgcaggccccacttcacagcacctcacagaatgaaacccactggcttggaactccagccagttaccggtagaaatgttgcacctccctgagacagagctcctgggggaaagtgtgggccatcatctttgctgtttggttgacttggccattccatcattcaggcttcagagagtccaagccaaccagcggctgaagcagaccctgagcacagcatagctgttctatgaaaatgtggctagactactttttcaaatgggtctcctatccctttcctcctcactgggtaggacctcctaactggggtctccaaccacctcctacaggtgcgtttgggccagcaacgggtctgtacatttctgggatggagcttccagaggtgggggcaggctgccatctttgctgtttcacagccttcactgttgctacctccagataataaaacatctgaggtgaccagggacggatgtggggtcccaatatactgcagcagccctatgaaaaagtgaccagacttttacatgggtgcccatccccatatcggctcaccagacacatcctccaggcctaggcctccagctaccctctgctagaattatcgatcaagtagcagctctgtaactccctggacaggatccccaggggcaactgaaagttcctctgccactacctctgcagtagaactgcccttgctacccttggactaacaaaggaacaaagaccctaagcgcctcatccatacctccaataagctgcagttgactccaggagagaaggccagtctgtctctcacaggtcctacctacccccacccccctccttgtcaccagacagggaacccccagctcggacccacaacatagaacatccatcctgggctaattgcaaggagtaattgctgacctgcatctcaatggggtggagcccccaggagataagcaaaagacccttggccataaccatgccaaggtatcttcctctgctgctgccaagttggagaagaaacataacgctgagattgccccagagctgaaggggcagcccaggagtgccaagccgtaatctacagccagctctcaagggggaaagaaatctacactttcagagcattgagagggaacatggctgcaactgtgcggcaacacaggggagcctcacaaccaagcaagagtctaccaactgaccaatatgccgaagtgccacctactggatcacattccccaaagcatcaacaccaaaaatatctcactaacatacccccctctgaaaccaaagacaagtactcagcttcaaataaagaccctgtgcaaagccttggcccaatgaaaacttccaggaaagatgcctattgactgtattcaatctacattgcagttaaaggaacacctacacactgagatgagaaagaaccaatgcaagaactctggtaactcaaatgaccagagtattgtatgtcctccaaacaaccacaccagttctccaacaagagttcttaacgaggctgagctagctgaaatgactgaaatagaattcagactgtggagaggaatgaagatcattgagattcagaagaatggcaaaacccaatccaaggaaaataagaatcacaataacacgacactggagctgaaggacaaagtagctgttataaaaaagaagctaataggtctcataaggctgaataacacaatacaggaatttcacaatgcaatcacaagcattaacagtagaataaaccaagctgaggaaagaatcttagaacttgaagactggctctctgaaataagacagtcagataaaaataaaggaaaaagaataaaacgggaagaacaaaacctccaagaagtatgggattatgtaaatgccaaagctatgaatcactggcatccctgaaagggatggggaaaaagcaaacaacttggaaaacatattttaggatattatccatgaaaacttccccaaccttactagagaggcaaatttgctgccagtctttgctaacagtcaaatttaggaaatacagagaattcctgcaagattctacacaggaagatcatccccaaaacacacaattgtcaggttttctcaggtcaaaatgaaaaaatgttaaagacagccagagagaaagggcaggtcacctacagagagaacaccattaggctaacagcagatgtctcagctgaaaccctacaagccagaagcagtcagggtcctatattcaacattcttaaagaaaaaaaatcttcaaccaagaatttcatatcaggccaaactaagcttcctaagcaaaggagaaataagataatttttgggcaagcaaatgttgagggagtttgttaccaccagacctgctttacaagacatcttgaaaggagcactaaatggagtaaggaaagactatttgcagctaatacaaaagcatacttaaatacacagaccagtgacactgtaaagcaaccatacaaacaagccagcataataatcagtgaacaacacaatgacaggattaaatccatacatattaatactaatcttgaatgtaaatgggctaaatgctccatttaaaaggcacagagtagcaagctgtattaaaaaaaaagcaagacccaatggtatgctgtcttcaagagacccatctcatgcttaataacacccacacgctaaaaataaagggatggaagaaaatctaccaaccaagagaaaacagaaaaaaacatgggttattgaaattaaaattcccaatttcaaaaaaaaaatgcaaaaaacaaaacacacacatgcacacacaaatacacttcaaaccaacaaagataaaaaaaaggcaaagaagggcattacataatggtaaagggttcaatgcaacaagaagacctaactatcctaaatatatatgcactcaatacaagagtacccagattcataaagcaagttcttagagacctacaaagagacataggctaccaccacccaataatagcccaggccctgatgaattcacagctgaattctaccagatgtacaaagaagaactggtaacattcctactgaagctatttcacgaaattgaggaggaggaggaacttcttcccagctcatcctatgaggccagtatcattctgctaccaaaacctggcagagacacaacaaaaaaagaaatcttcaggccaatatcatgaggcccatcaattcaaaaatcttcaacaaaatacttgcaaaccgaattcagcagcacatcaaatggctaatccaccacaatcaagtaggcgtcatccttgggatggaaggttagttcaacatatgcaaaacaataaatgtgattcatcatgtaaaaagaaataaagagaaaaaccacatgattatctccatagatgcagaaaaagctttcaataaaattcaacacccgttcatgttaaaaactctcaataaactaggtattgaaggaacatacctcaaaataataagagccttctatgacaaacccacagccaaaatcataatgaacggacaaaagctgaaagcattccccttgaaaaccagcacgagacaaggatgccctctctcaccactcctattcaacatagtatttgaagttctggccagggcaatcaggcaagagaaagaaatgaagggtatcaaaataggaaaagagggagtcaaattatctttgtttgcagatgacatgatcctatatctagaaaaccccattaccccggcccaaaagcttcttaagcggataagcaacttcagcagtctcaggatatatcaatgtgcaaaattgctcgcattcttatacaccaacaacaggcaagcagagagccaaatcatgaatgaactcacatctacaattgctacaaagataataaaatacttaagaatgcagctaacaagggaagtgaaggacctcttcatggagaactacaaactactgctcaaggaaatcagagaggacacacacaaatgggaaaacattcaatgctcatacatgggaagaatcaattttgttaaaatggccatactgcccaaagtaatttatagattcaatgctattcccattaaaccacaactgaaattcttcacagaattagaaaaaaactattttaaaattcctatggaaccaaaaaagagctcgtatagccaagacaatccaaagaaaaaagaataaagctggaggaatcacactacctgacttcaaactatactacagggccacagtactcaaaacagcatggtactggtgcaagaacagacacatagaccaatggaacagaatagataacttagaaataaaaccacacaactacaaccatctgatctttgacaaacctgacaaaaacaagcaatggggaaaatatttcctatttaataaatgttactgggagaactggtagccatatgcagaaaattgaaactggacctcttctttacaccatgtataaaaattaactcaagatggattaaaggcttaaatgtaaaacccaaaactatgaaaactctaggagaaaatctaggcaatatcattcaggacataggcacaagcaaagatttcatgacaaaaatgccagaagcgattgcagtgaaagcaaaaattaacaaatgggatctaactaaactaaagagctccagcacagcaaaagaaactatcatcagagtgaacagacaacctacagaatgggagaacatttttgcaatctatccatctgacaaaggtctaatatgcagagtctacaaggaaattaaacaaatttacaagaaaaaaactggatcccattaaaaagtgggcaaaggacatgaacagacacttctcaaaagaagacatacatgcggcaaacaagcatgtgaaataaaacttcatatcactgatcattagagaaatgcaaatcaaaaccacaatgggataccagctctcaccagtcagagtgattagtagtaaaaagtgaaaaaataatatgctggcaaggtcgcagagaaaaaggaacatttatacactgttagtgggaatgtaaaatagttcaaccattgtggaaagcagtatggcgattcctcaaagagctaaaagcagaactatcattcaacccagtcatcccattactgggtatatacccagaggtatataaatcataaagacacaggcatgtgaatgttcattgcagcactattcacaatagcaaatacacggaatcaacctaaatgtccatcaatgacagattggatagggaaaatgtgatataccatggaatattatgcagccataaaaaagaatgagatcatgtctgttgcagaaaaatggatctattatccttagcaaactcatgtaggaacaccaaatactgcatgttcttacttatatgggagctaaattatgataactcatgaacgcaaagaaggaaacaacagacactggggtctacttgagggtggagggtgagaggagggagaagagcagaaaagataactattgggtactgggtttaatacctgggtgataaaataatctgtacaacaaactcccatgacacaaatttacctatgtaacaaagcttcacatgtactactaaacctaaaataaaagtttttttttaatggataatttggggagcacacactaagaaattttaataatgtcaatttttgttaaataattttcccttaaaagaaaaaaaatactattttaagttatttgttttcatgatgattttgtaaataaccccagcccaagactagccataccttaccagagaaaagaaataatgtttcatatggctttctatcccttaagggaaaccaagacaaataaaaccaaacaaaacccaagaaaaatctacttcagatctcgtatttttatacaaatccaatttatattttgaaaagcttttatgatttcatttagttagaattgatattcctaacgtgcagtccataaattgattttggggcttcagattatcattgagaacagcttttgtcataaagcttctgtatgttagacaacagttgagtttagcactgaatgtagtgtttgtgaaattatttgaacaattttttactgcattatttggtaagataacataaaaattgaaggactagcattagtcttataaaattcatataatttaaacaaatatgtaaaaatatatcttaggcttcaatcagatgctcatcaaacttaagccaatcaagatttcaactgtgaaagaaaaaaataagataaatgtgtaaaatgctagacatgtatcattaatgattgagtacaaaaattatggtataattgaaaattctattttattttatttgttaagctttcgggaaccagataaatcccccctttgatgatatatgctattaatttgattttcagacatgcacatttcatacaacttacaggaacatattacatatgaaataataaaatcaaagtcatctgcacttaatacaggagtgcttgtgattcaggatgtggtagacagaataatggccctctataacagtacacattctaatctctggaacgataaatatgttacatggcaaaatggactttgcagatgaaattaagttaaagatctcagcttgaaagaattattgtggattatgtgagcaggcttaatgaaatcataaggatctttataagcaggagataaagggaaaaagtcagaaaattgagatgtaacagcagaagcagaggttggaatgatgtgctttaaagatggaggaaggagattaagagccaaggaatgcaggtggcctcagaaactgaaaaagaaaggaaacatattctcttcccaagtctgcactttgaatttagacttctgacttccagaactgtaagaagataaatttgcattgttttaaaccactacatttatggcaatttgttacagcaacaataggaaatgagtacatcatggtacttgggtctccctgttccatggctttttgaagtgaagtctggttgtggtgcttaacacgagtctgttttatcacaactaagccgctccctaaatcttcagcatacgattcaagaaaggaaaatataggaagtacagttttagaaactgaaggaatttgagacgttctcttctgcacatcctagaacacaggttggcctgaaagctaagaaacctgcactttaacaagcaaaaacatctactgaatgggattaatagaattagctgtaaagagtaggatctgggctggccacttctggagtgaaggaatggattaattagataggaatgcgaatgcaatctaggagaatattcatgtttcagatgcagatggttctgcgatagtcccacacatactgacttaaaagagaagaaataccatttagttaatcctccaccttggaagcccgtggattatgctgcttgtctttttttttttttaaacctgtctgtagtgattttccttgcttcatcatattttcttactgccattttagttggatttcccccttatctttcaccttcctttctccaaggaagcattaagctctagtgggaaagtctgcagaagcgggccaagggaaaaggggttgtggttctgactggaatgttgattaggcagatggaatctctgggaacaaaaagaacatataggacataacaaatctgagtgctggcaaggtctggcctttaagagatcaatatctgtatccatgcatctaaaatttctattctttaattgcttaaaaaatatgcctccaaaaatagtaaaggcagctgctctgtatgtaatgttagatatgcaccctcattcattgttctatgagagcattacagatgtttcctcttctcctccatggataccctctgctttgattttctccaaggatgctatgagactcaaagcacttattgttttgaatataggataatgtgattgctcctttacttctgcagattcccaagcaatcatttagtttcatccccaatggatttgataggtgggcagcagagccattcctctttgaagctatatcctgaggtcttcactttggggaaggggagaaagcaacagctgaagataaaatggctaatgtgccaagtatttcctcctcaaatttttacgtttcattctgagatacgttatattattatttccgttttatagatgagaagactgagacttaggtaatttgctcaagatctctgagaaagtcaatgacaggagccccagttcagcctacatagtctgcttacagagtttgtgtctttgttcacagtgctaaattgtcccccagttagcatcaacacacactccccaaactcctgcctgcaatgtctatatttggtggccttttatgatgttccttgcctattgttttcccttcacctattaataaattatttctttagctttattgatcaaagctgcccaggcattttaactaacatcacgtgtgcaaagtttttaggtgtggagtgtggggtttagcaggaggcctgtgtgggggctgtgctccccatcctgacaagcacacaaggaactaggatgatatccttgagattggctgggctaccattgtttggattctctttcttttaaaatatatttttcctatggtatatgaataaacatttaaaatttttaatacaatgtttgaatcttcttcagatattttatgtgaaagttaggtcactgcttgggaaggaatagaatttcaacctttgggatgaggatgcttaagaggatgtggaggacttccaaaccactctgaaatgttttcttacctgaggaagtcttctagacctggcagtagaaacctaaaaatatccctcatagccttcctctaattgatgctagttattagaatctgagctcaacattgcctggaaagggtgggcatggaggcatgtgtctgtagtcccagctactcaggtggctgagacaggaggattgcttgagtccaggagttccaggtcagcctgggcaacatagcaagacccctgtctctacatacatacatacatacatacatatatacatacatacatacatacatacatacatacaaagaactgccttaggaaaggaaaggagacaaagagtaggaaggagaaaaattatgtccaaaaataaccacaggaatactatcattcattcattttttatttatgagtgtacagaaattgctgggcattgtgtgattatataattggaagtaaaacacttctcagcaaatgcaaaataactgaaatcataacaaacagtatctcagacaacagaacaattagattagaaatcaaaattaagaaactcactcaaaaccacacaactacatggaaattgaacaatttgctcctgaacgactcctgagtaaataatggaatgaaggcagaaatcaagatgttccttgaaactaatgagaataaagagaccatgtaccagaatctctgggacatacttgaaggaactcttcaaggagaactacaaaccactgctcagtgaaatcagagaggacacaaacatatgtgaaaacattccatgctcatggataggaaaaatcaatattgtgaaaacggccatactgcccaaaataatttatagattcaatgctatttccattaaaccaccattgacattcttcacagaattagaaaaaaaacatttttaaattcatatggaaccaaaaaagagtccttataactgagaaaatccaaagcaaatagaacaaaacaggaggtgtcacactacctgacttcaaaccatactacaaggctatagtaatcaaaacagcatagtactggtgcaaaaacaggcagacagaccagtggaacagaatagggaacacagaaataagatcacagacctacagtcatctgatctttgacaaacttgacaaaaacaagcaatggggaaaggattcgctatttaataaatgatgctaagaaaactggctagcctatgcagaaaattgaaatgggaccccgtctatacaccttatacaaaaattaacttaggatggattaaatgcttatatataaaagccaaaactataaaaaccatagaagaaaatctaggcaataccatttaggacataggcatgggcaaagatttcaagacgaaaacatcaaaagcaattgcaacaaaaacaaaaattgacaaatgggaactaattaaactaaagagcttctgtacagcaaaagaaactctcatcagagtgaacagacaacctacagaatgggagaaaatttttgcaatctatccatttgacaaagatctaatatccagaatctacaaagaacttaaacaaatttacgagaaaaaaacatacaaccccattaaaaagtgggtgaaggacatgaacagacacttctcaaagaagagattcacgtggccaacaaccatatgaaaaaacactcaacatcactgatgattagagaaatgcaaatcaaaaccacaatgagataccatctcacaccagtcagaatggtgattattaaaaagtcaggaaacaacagatgctggtgaggctgcagagagataggaaggcttttacacagttagtgggaatgtaaattaattcaaacattgtggaagacagtgtggcaattccttaaagacctagaaccagaaataccatttgacccagcaatcccattactgggtacatacccaaaggaaaataaatcattctgttacaaagatacatgcccacgtatattcattgcagcactattcacaatagcagagacatggaatcaatccaaatgcctatcaatgatagactggataaagaaaatgtgctatatgtacaccatagaatactacgcagcaataaaaaggaatgagatcatgtcctttgcagagacatggatggagctgaaagccattatcctcagcacactaacacaggaacagaaaaccaaacaccatatgttctcactcataagtgagagctgaacagtgagaaaacatggacacagggaggggaacaacacacactggagcctggtcgggggtaagggagaaatgagaacatcaggaaaaatagctaatgattgcaggacttaataattaggtgatggattgataggtgcagcaaaccaccatggcatgtgtttacctatgtaataaaactgcacgtgtaccccagaacttaaaataaaaaaagaagacataaaaaatttaaaaaaatacacaattcaatggtttctaatatattcacatagttatgcatccagcatcacgatagcattttgttttaggggcttacaatataccattgtgcagacatttaatttgttttatttaattagtctcccaagcatattcaaatttttccgtttttaatctggaagaagcagtactttcatgattgtatgtatagatttgtgcacatgtgcaaatattgctgtcataggcatttctaaaagtggattttcttgatcaagctccaaacactttaaaatgtgatggatcttaacaaatttcttcccaacgttgtgcccggtttaacttccccatcagtttatgctcatgctagttcaccacactcaccaatatgaagaagcatggattttacatttgtcattcgtgaggcaacaactcattgttttcatttgtatttttattatgtggggtttcggtatttttcaattttaacggaccgtttgtatatgttcttctgtgaatttttaatttgtgacttttgctggtttctttctttattggattgccaatctatattcatactgatttgtaaaatcttttaatgtgttagcaatactcaccctctatcatatacgttgcaagcactttttccacatttgtctttcaagtctgtaaatagtgctattcaccacataaaattttaaactgctgtgtggccaatattttcctgtttttggctctcgtatcatgtttatgaaatttctcagtaagaagaaaacttttgatttagtaaacgggaaataattattttttaagtaataaagtcagggtgaaatattttttatttacttgatatgactagttgttttcttcttttgccattaattgcagtcttcaagccaatacttctttagaaatatgacagatttaataccaacactaggaccatttgaagacagaactgtgtgttttaatagagataatatctcaacaggagtttgtgaggctgacagtctctgatgttctgaccacctacgtcacaatcctcattggggactttctaagggcatgttttgtgaggttttgcaattattgctggtgctgggacttggagtatggatatgtaagtatgatgttaattttgcttttttttttttttaaatttatttattttttattgataattcttgggtgtttctcacagagggggatttggcagggtcataggacaatagtggagggaaggtcagcagataaacaagtgaacaaaggtctctggttttcctaggcagaggaccctgcggccttccgcagtgtttgtgtccctgggtacttgagattagggagtggtgatgactcttaaggagcatgctgccttcaagcatctgtttaacaaagcacatcttgcaccacccttaatccatttaaccctgagtggacacagcacatgtttcagagagcacagggttgggggcaaggtcacagatcaacaggatcccacggcagaagaagttttcttagtacagaacaaaatgaaaagtctcccatgtctacttctttctacacagacacggcaaccatccgatttctcaatcttttccccacctttcccgcctttctattccacaaagccgccattgtcatccgggcccattctcaatgagctgttgggcacacctcccagacggggtggtggccgggcagaggggctcctcacttcccagtaggggcggccgggcagaggcgcccctcacctcccgggcggggcggctggccgggcggggggctgaccccccacctcccctcccggacggggcggctggccgggcagggggctgaccaccccacctccctcccggatggggcggctggccgggcagaggggctcctcacttcccagtaggggcagccgggcagaggcgcccctcacctcctggacggggcggctggccgggtggggggctgacccccccacctccctcccggacggggcggctggccgggcggggggctgacgcccccacctccctcccggacggggtggctgccgggcggagacgctcctcagttcccagactgggtggctgccgggcggagaggctcctcatttctcagacggggcggctgccgggcggaggggctcctcacttctcagacggggcagttgccgggcagagggtctcctcacttctcagatggggcggccgggcagagatgctcctcacctcccagacggggtcgcagccgggcagaggtgctcctcacatcccagatgatgggcggccgggcagaggcgctcctcacttcctagatgtgatggtggccgggaagaggtgctcctcacttcctaggtgggatggcggccgggcggagacgctcctcactttccagactgggcagccaggcagaggggctcctcacatcccagacgatgggcggccaggcagagacgctcctcacttcccagacggggtggcagccgagcagaggctgcaatctcggcactttgggaggccaaggcaggcggctgggaggtggaggttgtagcgagccgagatcacgccactgcactccagcctgggcaccattgagcactgagtgaacgagactccgtctgcaatcccggcacctcgggaggctgaggctggcggatcacttgcggtttggggctggagactggcctggccaacacagcgaaaccccgtctccaccaaaaccagtcaggcgtgtcggcgcgagcctgcaatcgcaggcactcggcatgctcagtcaggagaatcaggcagggaggttgcagtgagccgagatggcagcagtacagtccagcttcggctcagcatgagagggagaccgtggaaagagagggagagggagaccatggggagagggagagggagtaattttgcgcttataaggtttttcctttgtaattcgtcatttacacacactatataagagaaaggcatcatagagtttagtggatgggatcaccgttttaggtgcaataaatgaagaccaatgagtacatttataatgcagagaagttcagactcgagtatcatggtttacaatattctagtaaaattagcacaagatagcaaaagcaatggacctcaacttgtcagctgaaatgttgaactcagtaaatcttggccctgtagcccaccttctccctataagtttactagcatttctagaagcagggaaagatggctaatatcaactgcatattctatttatgcctttgaattctactaaactcctggatactatcatatgccagtcactgtgcagtagatggggtggataaaaggatttgataaatatggtacttgcttcacaaagttcacagtctaataagagctcgaaagagacacacacaagaggctgcagaaggttcaaggaaggcctagtttgctgtcatgcatctggcaagtggtggagctgaattctggcaggggcggcttcttttcctgaaacaatggctcaggtctctcagaaccacactggtgctgactccatcaccagctttccttctatggtcatcctcaggtcccccaacaaagtctgagggcaacagcacactcatcaccctgtgattagcacattgcctggtttccactgtcctcctttgagtcaaactggtctcagtcatcctggaaaatatgacctggggggttggtagtactcatttgcttaaaatcttccagtggcttctcaagtacttagaatgatttccaaatccctttctaggccttcagtaccctggatgatctgctccttttctttctctctcaagtcatttgctacctcttttgctcttgctttgtaaagttcacatgggcttctttttatgctcaaacatgggctgctttttatgctcaaacacaagatggtccttgcatttgtaattgctgtttctcccgcaaggggtgctgttgccctagagctaggaatggctggtttcttcttgtcattaaagactcagctattatgttacctccttagtgctcttctctgaccacctattctaatgtagccaatcaggcactgtttatatcaacacactgttctgttttcttcataagatgtgcatctatttgacattactcttgtaaaatgtactcatggtctatctccctctgttagaaagaatactctatgaaaatagaggccctgacctctcttatttgaactgtgtgagtcacgtagcaggcagcatgtgttggctggctgtttgaatgttgaaccttctcatttttgcaccatcaaggcagcactgtctattgccagaactctgcctccttcgaagcatgtgcccatggagtctcagtgtttgtaatgtttttgagttattgagccagtaatgcttctctcctcaccagtgagggaatatcctttatagctgatcttctatctcttttatctcctgccctctagtctctggatgagtccaacagttaggactgttttcaagatttcaggctagatctgtctggctgtctgactttgagatggtaccttttataaggtcgtctccatcaccctcattgaaagtgcctcctcggactggccaaaagcagttaggtaatgctcttcggtgaacgacagtgaggtaatggctacagatacaggatgctcttgtgttgctttcccattctttgctatgaggtattcagctggcttggtttcatttctattttccttacctgattcagctcctctgaggcagacataaaaattgccatttcttccttagaccattgcttggcttgtacttaccttttatcccttggctgccttcttcttaagtggcagaaaatctgagtgcaaatatgaagtcaatattacatgacctggatgcataaaagctgtaattaaatgactgtaatttattatttattgactgctgacagtgttcctgggttagtagaaagtacaggaaaaaagacaagttcctgttttaggtcacagagaaggaattttctcccacgttacctttggaaggctcaaaaaagctctgtcagaatcaaaacaagttttaaaacattaatgatggatgacgaatctttgatgtagatcccattgtcattgacttaccaaatggatagcttacacgggtgagggcctactaggtgcaagccattatgaacaaactctgtgctaggtgataaaggaatacagggatgtagaagatgtagacttacgtagaggttgcaaatttggcctgcagggtagattcagctaatggatatttttgtttggtatgcccagtggtggtgtttgtttttgtttcattttttatgagctaatattttaaaatgagagctcttacataaaaacacatggatttattgtttttcttgaaaggctggcaacattaaatctgtattcccactagggagaaattggctggagttgagaaaccactgccatctgcagttgggatattcattctccagttcctcatactcttcaccactcttttctcttacaagctcccgatataaatagagaaatcaattgtatggcccttgaagagaaagtgtgtgtgtgtttgtgtgtgtgtgtgagagagagagagacaggcgtgcatcagtagaaatgcagacacagaggaggagacatttgaactaagtcttgaagaatgatcaggatttcaagagatgaaagaaagaattcccggtggagggacaagtgtaagacagagcaccagagatagatagtgtgggcaatccaggcatagattaaaaaaaaaaaaaaaaaaaactaaaatgaggctgttttagagcagaaaaggctaataagaatgtttctctgctattctcctagacctgctaatcaataatatggtttcagaaagtacctgtcatgaagggaaggacaacctgagataggcagaggacatacttgagaattctgtcagaaataaaagataaaatcatggtcctttctactgtatgcatgcatgtgcatgtatacacacacacaaagcacatgatttttttcttctgaattccaaaaataatgccagtttattgtagaaaatttggaaaatataacaaagctaatatgaaagtaaaaatcataggtaatctctgccactaatgagattaattatttggattgttgaatcaaatagtgttagataacaagtgctacatatttatatatagtaacagatttttataaatatacacatatatacttttgtatacgtatatatgtgtgtaaacaggtagtagagtagactggttacttgcttttatttgttttacctaacactgatcatttcccaatgctattaactgttgttttgtaacataccttttaaatggttgtataatattctgtatgcaaatgtagtataattaatctaattagtttttaatttgctttaagttgaactgtctaattattcttatgataataagtgttgtgatgacatttaattatatccatgtacataagtatcttcatagataaatcatagtggatgtacaaattattttcttatgataaatttctctgagttgaattgctcagtcacagtagagggctttaaaaaagtctattcacttttattacaacagcctctgtagagactctgcagatttcagcattagattcagagatctatagaatgctaaagttaggtggattttgacacaaccagttgtaatgcatgtatttaacatatgaaaaattgcatctgtgaattgaaatgaggttcctaagtttatgtagccagagaataataaggacaatgaagtacacttctggacgaaaatgttatgttaaatgtattgatttctgtactggctctatctgagtaagctgggttaaaagggattgtgaatatttttcaagacacaaatttatggtcataatgttatcacaacaaacctatgaagattaactaaggtggaaaaattactggcttggagcagattaccagaccaatgtaagttaatgtaatgtaagttaatgtctccaaaggcttctctgagcacagttctcagtgtttcagaagagttcatgaggagtagaatagtttgtccctaggaaggattttaactgctctaatttaatacaaagtgtgccctcttgtaaactttgggttttctttggcagttcaatgcagaatatctttatcttcacttcagttttcattgacaccattcttactatttaccagcaaagcaagtaaagaatattcaagaagaaatagaattagattcagggcatgatggggtaagggaatgttcaataaactcagcatggtgttcacagttgtatttttaaggtgatcattgctcactcgtaagtgagagccgaacagcgatgggagacttctttaaagtctgatgaaggatgctcaggattatccataaataagaggcatataattgactgactaccttagtggattcccaatcatattatattgtattatgtcacatctcaatgtactgcttattttgtatcagaaactctacaaaatactttacatgtattattccatgtgatcgtaccagcaatgctgtgaggtggtattattgttcctactttacagtaaactgaggcttagaggatgttaaataattgctcaaagacacattaatggttagtggtagagttaggcctgaaactcgagtctcatcaccttcaaagccatcaaccaaatttccatcatgttgaatttacaccgtaatgcttgactctagaaattttaaaaattctgccaaaacttgaataattcatacactaaacctatggcttttggaactcaaagtgctcataggcttaggcaggctacctgtggtagaatggagttagcaaatgaactgggatacagaattagaagatcaactgttctctagctgggaacgtggagatattatatatcagttcgggaaggtagaatgataaagaatcaggaagaaatcatcagcatcccataaggggttgagaacatgggaacagggacaatgcagactgtattttaagtgttccttgaatatgtggacaggatctgtctgcagttaacaggatcctattctcaactagggttgaagtacaaagcctcaagtgctcaatcatcctagcagacgaggctagagtttgtcctagatcagtgcttctggaatttgagcatacatcagaatcccctgaggacctgtgaaaacagcatttctgattcagtagatctgaggccaggcccgagaatgtgcttttctgacaagttcccaggtgatgctgctgactctcgtctgaggaccacactcaaaagccactgctctggagccacagcccagactagcttgcagctctaagcagagtgattccagctgtgagaaatgggatttatgtgcagaaggtcaggcaactcattccacaacagaattaattctctctgagatcctgaattgcatttcatattatccacaggttggcaatctgcctcaaataatgaaacttgcagagagagaagagatcttcccaggctttttctttgtcaagtgagcaccatatgtcttccctctgggtggatgactgacttagcacatcacaagcaaaggtccaaaaattaaacaacatcatttccaatccctcaactatgatggactttagcccaaatccacatgggcttttctgatgctggcccccaacagtcttaccaggaatgagcagtcattagtgagtttattacacttagctcattcaaataattttatgatctcaaagttcaagagaatctgtttttttttctttttccctaaccgttttttacctttgagctttttctattttagagacaaacaaaatatattgcaaattgatttatatttattaaagtattgctttaaaaatttaaaatataatataacctaatgtttataaaagcctacctctaaaacaatgagcactgacttttatactacatatgtgtagtttttctgccttctcttttgttttagttttaaagtgagagcttctgtgtttattgcataagttaaattccatttctaaggtgtttacagagaagcaattctttcataactggttctaattttcaaccaataacgtatttttagactagaaagggatcttagaaatgaactagttcagaggttggcaaacttttgctgtaaagggctagatagtaagtattttagcttttgcaagccatggtgtctctattataactgctaaatgctgttgttttagtaccagtcatagataatatataaatgaatgaatatagctgtattccaataaaatttatttgttaaaacaggtggcagtccagatttggcacatgggccatagtatgctgacctttggtctagttcatttttgatttatgtgtcaggaaactaagcctaatgagataagtgacctgcccagcttacctagctaagaaatggtagagtgaagtctaaaatgcaggtttgaatcccagtcaaatgtctgttctacaaatccacttggtccagtatggccaccctgtatcctttctgtgcatcaggccaatttatagatcaagggggttgttcctccagctgtccctgctgcaaacacagcaggaagctagggaccctagggtgtcctttatgcttttctagtcaactagttataaaatgtctcatctctaatgaccctcaggagctctatgtgcttgtgagagagtgaagaaaacaggcatttaaaacgttgagttttctccacgttcagtagtttggtgggccacctcatgataccattctaaggaggcgaaggcttaagatttgatttttaaacagagacagagaaaggctgttccaaggcaacagatgggtacgggccaaccgagtaagcatttttcagatgtgttctgtgatcacacagggctccaggggaaaagtgctgaagatcatccagagcagggcactcccccagaaggaaaaagactcagagttaatgttctccagataagaagcagttcatttttctccatgaaggacacattttttttccattgatgatttcagcacaaaaactgtcaaccaaacctttttgcctcttgtgaacattgcccttctagaaagtcggcaaactaacgaaacactttgtagctgtccttcaacagtatctagagtgatactgcagttatccaggtcatctttgttctgtttaatacacaggactctttattatttcattatgtatcatcctatcattttaccttgagggttaaccattcctgttatgccatacttgctcttctttccctgaatctgttacaagggagattgtccctatgtttcagttgaataggagagtaatactgccttttaggaaagtgatgaagttgaggcctggattcatgagactcttgaggccaagcatttgaaaattgagaatggttttgttggagttccaaatcaggaaccaattctatctttttacaaatatatttttgagttcttgggtttgggaggaacagaggctctcttggatcatctttgtgtgtgtgtgtgtgtgtgtgtgtgtgtgtgtgtgtgtgtgtgtgtgtgttggggagggagctgttatggggatatgtgtggtctgaagcacacctggagataataagatctgagcagtgctaggaacctgccaatgtcttggtgtctttttcgtggtcttcttggccctctcatttcgtatttactgcattcttattcccttattaccagttggtcagtctcctctgattctctatcccaaattaaataagagccagttttattgcccttgctaattagcatttactccattgttagaatctcctgttaggatgcctaatgcatcaccaggaagcctttagatgggccaccctatcacagttaaccacttccattctattggttttttgtggctcctctgtacaaaaaacagcctagtgttgctgccctgagcatgaaggttaatatccaagacatggagactggacattgaattgagtaacttcttaagctttttttatatttcttttgctgtatttactttatgttaaagttaattcacattttcattgaaaaaatttttaatatgcaaaacttgaaaaagaaaaggaaaactatagttcatcacccgcatataaagtatgactatcttgctgattattttccagtctttgtgcatagtttcatatagttgattaatgtgtggctttatattttttgtttaacattagagcacagttttcctcatgtacataaatattctttcaaaatgattgtaattcattgcaatatatcatagtataaatatactgtatatacataactaatgttcaacacttagatggtttcatcattgcttgttaaagtttatcatcacatcagataattttattaagacagattctagaagttttcttacagaatcaaaaagaataagatttttaaagcttttaatatgtactgtcaaattgtttttctgaaaggttgctacagtttttactgtcaccagcagtgtataagggagcctgtcttgctgtactttcatagcattggatgacagcatttaaaaatgagtctcactgtgtttaaaaaaaaaaaggtgctttctttgttttatttatatctggttacttatcctagtgattattctgctattgttgctgaagggaagtaattgaaaccctagccatgcctatgcagaacaatttgcctttcagttttgaccatgtgagacgctaatccaatgaacattgtgtctcctctagccttcatacaccgaattcgacatcagtggcaacgtcctcgctctgatcttcaaccaaggcatgatctggtaggccagctgttggacagcttatcacttacagaaaagcctcccaggttatttttgcatacagcattgaatcctggtgttagaggagaatacaatcggtgtctaactccatatttacttttgcaaagtggatgcctgtatatagtttccttttctttcatatcttaaatgtcagtcatcaaaggtgtctctctgttttgcaaagcacttcttcatcaaataatgggagtctgtgttctggttagcagatttatttgaggactatatttttatattttgtgacgccaggatctaatattaaaacattaataattacattaccacatgataagtatgaaataaattaacataaggcctttccgagagaccgagtttattttgttgtcactactaaatatatttaaaatgtaacttatagctacttttaaaaataataccttatcaaatccaatagtttatcgagatgaaacgcatgttttaggaaggtcgagttaaaatatgatcttcattttgtaacttgttttatagggccatggcacatcagaattattttttttgatgtgtgaagggttgtcatatcttttatcaaattagagcattctcactgtaaacttgacaggttaagatgagtcgatacagtagaaatcgtttttgagtttaaaaactgaatcacgacatccgattcatctggggaccatgtgtcttggaaatctgtcacttcagatttccagcctacaagcagttacaataaggctactttatcctggggacatgtgcctaagacaatattatgctgccaaccataccattgtcctattcacaagtgccggtatagactcagtttttgaacaagtttcatatattgtaccaatagatctgtcctgaattattaaacctttgggtgctgacagacaccggacccctctgcaaatgctaaaaccgtcttgcttctgtcacacaaagacaactctccagggctccatcgtcctgccatgggatgactgttaaattcctgtgcctgactaggtgaatcaatatggaaaagatattataaaaatattgtttcctcctttgtcaggtaggtttaaaaatctaatttttattcccttcctttctaaattttccaagtatgactcacatgtccagactcactaaggaaggaaatgcatcctacattttccaagcagggaggaaagtcaaggtggcccgaggaacgtctactgacacagaagtaaagggagcagcttctgtgggttctgagctttcatttcctggagttcaatttgctgttatggcagaaaatggctaacacggctatgggagtaatgagaaaccactgttctatcagtggcttttacacaaagtgtcataaatccttcaggcctcatgggtaccattcacgcagacatatgctgcacgtcgattgtgttctttcagagttaagacaacagattggtctagaaatttgtttttattgtcagaaaagctgttataatggctgtcctgcttggtttcactactgattttgcaactatgttagtccactattgttcatattgaaattcttaaatatctaacatgtttttccagttctctcgtgggcagatccattatcaaaatctctgcactgtctttttctgtttattaattcttcagacagtggtcaagcttgcttctggctaatttgaagagaatattgagttttttgagcatacaaagatattcacacactttccaaagttccagaagcaaactgaccattattctattattcaccttcacgtcaatgcttggcacaaatattcttttcctaaccctaggaggctgatgagggagggggatgtcatgtagagggaggtgtggggcaggtgtaatgtaaaattagtaggctgactctgcacaaaggtcctcacacacaatcgttccattattttatgaagcatgaggatataatgcctgagcttaaccattttctacagaaacaattaaaaatgtacggggatgttttattcaattccattggcttgtgactggagatattgaattactcctttaggaatcgctgagtagtggaggttatttacgcagatgttgttaacatcaacatttatagataaaatccattttgctatgatttggttgaatgattagtaacctttatttacgcacttattttttgaaatacacatgatagtttctgtgctaatatttttaaatgatgaaagcacagaatatctttatcatagcaggatattgagaaatggcagagaacacacagtgagagagaaaatgagttttggacattgctccaacactgcttcactgggtactctcccgccaggtttatcacctttttttcttcactttctcagttgatcagatgtgaataatttacctgacatgtacatgtcgctgatgtaataaggagagttaaataaaagaagctttcattttctttgatcttccaggaagaaaagaattttataaggctaaagtgttacaatgatttttactgacagatgatgggatcatgcctgggtaagggacttagtgagccgagctgattagtaatgcatgagtaaagataggatgagcattaacattcggatattattatgccaggacttatttttctagcttatggctcttgagttatttgtttaaaatgtctttgtgatacttattttgaaattttgaaatttatttatagatgtatacacaaataataagcatatacatacaaacaatgtgcacgtatataggtacaaatatatgtggttttaggcaagtctcgattttgaattacgtgcaaaattatattttagaattgatcaggttatgcagcaatgaaacaacctcaaaatcgtagcagctcataaaaggaacatgttcaatgtggggtggaagaagagctttgctcttagaacttaccttcactttagagacccagactgatggaataggatccatctgaaacattgctatcacactagcagagaatgaagagaaggaaaaccacacaggacttttaaagtttctacccagcagtaaggacctaatttctattcatactttattggccaaaacaagtgatgtcaccacctgatttttaggaagactcaaagtgtattacatcaacatgtattggtattggggagtataatctagtgctttgcaattctaacccattagctgggactatcacttgcttacttgctcacttttttggcgttccctctctcttgctgtcctgtaacaaaagtatactgtattgttttaaaatctgtcttctcattagaaaaaaatagtttaacttcctacaaagtctttgttcaattcattatggtaaaatatcattcgtatctattgtccgaaatcttgtcaacaagacagcccaaattgtgacaatattccacttttcaaataaatgagttaactttgggttggcaaaagttcaattatagtggaaactaatttcttcatctaaattaaaaatgtctctataatgaaccaaatttacgttggattggctaaacaactattcagggagtacaaaatgctaaacctagctataaatgttgagggcttcattatagataggacagtttaaaagacagggctccccttacatttttaaaataagtgcacatatatcttctttttgattttgaaataataaattgctatttatattgatttatggtgctaatgaattttctcatccaagaagagtgaaacttattttgttgaaataatcaactaagccatcaagtaaaagtgaccacacctaagttgttcccacctaaaagtagtattttaaaatgcttataaaaactcagatgcacaaagcagagaattcccaagacaagctaaagtaagaaagtaaacagataaactaaatttaaataaatgtgtggaattttcatctcaaaaacctataagctagttataaattttcaataaaaccctattttaggaggcacaaacacatcattgcaattggctttaaaacaccatatcacctacaaagagaaaatgatcaacatcagaaagagaaaatttattttaatttttttctttcattaagcaaaaaacttttttcatttgtacagtcgtggcccactgcaaccttgacctcctgtcattaagcaaaaactaattattcatgacagaagtgattaatgcaaatgtacagtttttttgagtagaagaagtgactttaagggttaattatttttaacaagttatatttataggtgtattagtcaatgatataagtgttggggaaagtttattttagaattagaagaaagaagtaaaacaattgtaaatattgtttactctgttgtagtttaaattcactaatgatagtaggtatagttagttacagcatcctttctatgaaataattatgatatgcaattcctacaataatggggaaagtggcaaaatgtgtttagaagttggaaatagataagtgcagtttctttatgaaaagggtttgtctggttgaaagtggcagtgtattttctgcctttggaaaagaagcatgatgtcaaataaacaggtgcagtgtgactttgttatggagtaaagactcaaaactgagcagagttctgttttctttctaggatgggctccttctttgctcccagcctcccaggcatcaatatccttcgactccatacatccatgtacttccagtgctgggccgttatgtgctgcaatgttcctgaggccagggtcttcaaagcttccagatcaaataacttctacctgggcatgctactgctcatcctcttcctgtccacaatgcctgtcttgtacatgatcgtgtccctcccaccatcttttgattgtggtccattcaggtctcttgcttttgaaatttgactcaggcatcgtgttctttcgggggtggaggtgggaatggtcattcattgtataagctattttttccccccaaacaatgacatttttggttggtggaaatgagatcccggctgggcgcagtggctcatgcctgtaatcccagcactttgggaggctgaggcaggcagattacctgaggtcaggagttcgagacaagcctggccaacacggtgaaacctcgtctctactaaaaatacaaagaaaaaaaaattagtcgcgtgtggtggtgggtgcctgtaatccctgctacttgagaggctgaggcaggagaatcacttgagctcaggaggcggaggttgcagtgagctgagatggtgccattgcactccagcctggaggacaagagcaaaactctgtctcaaaaaaaaaaaaaaagaaagaaatgagatcctttgggtattcaggttcaataggtgacatggagattcttaggcaagttctgtctatttcctcatttgggaatcataaaagagaaaatactttatacttttccaggctctgcctgggtaaaatatgtatggtgaatctgagctgtttccatgttagaggatagctaagagcaaggtctgatgacagtggtctggatgtgagtttgcctgactctgggccgtcacatccagacgtggtcagctatcactacttctcttgtgcattactaccttaaaaagagagagagagagacagacagagagagagagaataccccacactttacctaggaaagagaattattactaaatactaatgagcataaggagggccacccaatttgttatccaaaatatcacatgctagtgaaaaaaattaaggctgttccacatatatattctctcctaattatcattcaagtcaggaatcgagagtcacaacggctccttgatccaatttagagatacacatttctacagttctctatgacagagctctcttctctctatgacacatatcagaaacctaagtccctgggatctggaggatgaagtttctttccctaaagggccttagaaatgaatctactacaagttctcccaagaatctctgcatgttgattcactggccagcatgcacttgagctgtttctccttttcagtgaaggaaatgagactgtaaaaagccatgtgaatgatatgcatgatgctgtaatgcccacatataattcctccattatgttgtcagacccaagttatttaattaaagtcaaaaggttcattgctgacagactaagtatataagagacattttcactcttaacagtagtctgagttattgctttgctggaaaacaagaaaatgttaagccagctgatcgagttaaactagctggacctctgtctactcagagaactgatgttgagaagctctgttaattccgttgtgtgtgtgtgtgtgtgtgtgtgtgtgtgtgtgtgtgtgtgtgtgtttccaagtgggctgaaataaataatgcagacagtgacatctggagactaaatatgaaattacagtcttgatgagacattcgtctcaataaattccgaaccaatctcagagtacaaagttcaaggaatatgccattcaaaggctttagttaattgcaaattattcacactacttattatccaggataagtttaggtgtgcattaagctattaattggaagttgatccttctcagtaaaacatagcaaaggaccctagctgcctgtaagggaaaccacacaatgtaaacatggatctccacagatgcattcagatttacaatacgtcttagacatgaacaatagttgcacaatttcagcttcttaagccctaactcttctggctttcctaattggcaaacttaggcaaaattatggcatgtaaatcactattttgaaatcagggaaatttattttttatttttaaaattatttatttgttttttaatttccataggttattggggaacaagtagtgtttggttacttgagtcagttctttagggtgatttgtgagaaatcagggaattttaaatattttcaatggagtactgggaagggttatctctatgctatttagattttttttttcatgtcagtttcctcactttagagccaaaggatgtttgcattgtttatttgtctggacttaaaagtttgaaaggattgtcctgctctagaaatgaggtgagaatgcttgtatgcttgtactagtgggtgcctcatagcttgtcatctttatgaaccccaagttttaggtgatttgcttaaccttcctggtgaaggttgtctgactctatctagatcctgggcaagcaggaatttaggaaatataaatttgaactaggttactggaggtatcacagtgatggctagttgctctccagtgtagggaagttttcaggtaagatggctatagtatatttatccattcagtaaagcaatttgatgagatattctagcttgtctggttttataagacctggctagagagggtaaattttccaagaaattattccaataggctagtaagtggatttatcgtaaatagttgacaatttaaagatgtccagatgaaggcaattctaattgttctatagcatttcctgacacctgatgtttcctcccatctatgtcaataattctgaacaatttatagttctctaggtttttatatacatccctgcttacattatgacaattttatttttcatatattttcatcttactgcaaagataatatgtgtttatgctagaaaacctaaacattgtagaaatatttttacatgaaaagaaacatggcccataatcttgaaaacctgaaataacaactttttagcattttatattctgttttgcctttcatgcatgatttttcataactgagcttgtactgacacaggatgtttctcagcctcttcactggactcacagaggggcaccctgtctactcggcctgctgtgcttaaccccttgtgggaggaagcacgtgggcaagtgagtgcgggatctggcgagacacactgggcactgacacaggagcaagctccatgtggggcccgtggccagaccaggtgtgtcaccttgaggagaatgcaatggtgcccaagtgcctatgaccctaaagccccagagggggtgttacaatgcttcctgagttccaccatcctcagcctgatggatggcagtgtcttagcagctcagttggccccttgcctcatcatgtggggcagctgccctccactggagagggcaaagggccagtgtgacagtctttcctgggttcccacaatcggtgggtcccaagctcttgtccagcatccaagaagaatgaggtcacatggattattgaaggatggtgaaggaggagaattttattgagtaatgaaattggctctcagcagagagggcagttggagaggggccaggaagggcaggtcatcttccccaaagtcaggttgtctcttctccaaagtcaggccgactcttccccaaagtcaggccgtctctcccctctaccaactgagtctgtggtctttataggcacaggatggaagtgtgtgctgactggtttgtgagtatgcaaaaaaggctaaagtgaaggtgtcactcaaaggtagacacgacagtatagaaacccaactaggaaagggtaggtatatgtaaaataggtgaagggtggggatgaatcagaggaaagtgcgccaaacaggaagacaagttctcaatccggtctgaggatttaacttggaccttggctttcaggctttaaactgtctttggcttggaggtggcatttcaccaggtacctgcccctatctgcctaggcatttggctgcctcctgttgctatcagtatactaggtgcaggttttttagtattaaaagttaaaattatattgtgagactgctattatattggtcatttgcaatcatgctttatgcatctatttttcttaatagtttagctgacttctagagattggggatagagaagtttcctctctgtggatctaggacacagtaaagtgctggtcaataatttgaatgaatgaatgaataatgactgcttattgtgcactaagcactagaagagacacagggttaagtccatgcattaagcattgattctggtcctgtggcacttatcacccagctgggaagacaggcctcctcataaactgttctaatctagagtggcgctatgcctacagcaggactatggatagacacagacaactggaaaacaattctgagaatattgtatgatagcatactttggctaacctggcaggagaaggcattgccagggacatgtagatgcgtccataatttgtacgtaattaagatatctggactcctttctttggtaaaagacctgacctgaaaaaggtacacaggaatccccagggacttagcaactttgctttgggtcacactggatgctgagaaggcctttgtgtgtagggataatttcataaaatttgaatgcccccactctaactacgttcatcagctatgacctgaggtgctggagaagggaggatagatggtcttatcttttttggtacttttaatttatctgcttatcctgtattccatctggctggggctgcattggggggtatgaacaatttggaatggtgaaaaataaaacatattggaatagggagttataatcttatattgcttgtaagcttcattccctcttatgtatcataagtcttgaaaattagagtgtagatctttaatttgtgaagcaaaacttgtacctctgtagtccaatgactactgacaaaatatatggagtcactatgtctgctggaagatagtattggttagaccaggagaaaaaaaccataatctgggacttgcgtgtcattgttatttagtagttgaaaatgcttaaagattaaaatacaaaagcaaaactaaacattgtattaaatgttgcaccaacatttattctgatgatgcatacaatttggtgaaacccaacccaaatctcttctgaaaattacatcttttcgtagtacaatcagtatgcatatacagagaaaataatgatgtaatgaatattttgaatattatggtacaattctagctattccttagtaagtcaagacatcctgttctcagttttctagtttataggagctgatacttgccttcatggagcttagcagtggagctaagctggtattcattagggcctgtccaggagaagaaactgagagggaaaaaacccatgattcggtgtggttaccttacctattaacatatctgatgaaggaagtctggtggaaaatgaggtggaagctattgcgtggaaagagatattggattatatgtggattttattccactgggctattccttgctctcatttccaaggctaattaaaaatacttagctcaaagagagtgttctcctacaagagcagctgactgagaggcagacttatgagctatttacaaaatatatttcaatcaaaatcttagaaatacagtttttaaaaatcttctcctaaatatgtggttaattttctaactgctttgactatatgtttatactgggatcatatttctcgtatcttacccatatattgactacatgaggtcaaagtgtcagcaagttgtagctaaacatcagattcctaccctgaaagaggacctaagcagtaattgagaaagatttccagttttcttgctttaaccatggtttttccatatgttcttaataaacttatctccccctttttaattcccccagtggcaaaaatagaatgtttgaagtcattggagagaccctggagcacgatttcccaagctggatggcgaagatcttgagacagctttcaaaccctgggctggtcattgctgtcattttggtgatggtgtatgtgcttttcctcctcatagaaagagcctctgtgatgttcttcctggctgtttttacatttcagctttttcagctctctcactctccctaagggttctgctgtaacctatccaaattcaacactgattacatggtggtgagaggctaaaattcatgagccatattctgatcctattggatgtaattcacaggcatctgcatctgtctttgcttccccaggattataagatttgttcccaagtaaccacaataattatccataaacagctaaagcaagggaaacataaatgctaaatgctaaatctaatcagtacattgagcttccccccaacaacccggcctccacctctcgttccataaagcagatggcaatgaatatacagaaataatgatcctctaagttaatattccccttgggggccctatagactatattttaggggcaagggcttcaagggtcttaaaaatttcactgtccttgttgttagagggccgccaataactgtgtgttcacgataatagaatcagaggaccagaggatcttgggaagttcctgtagtctgtcccttcaaagtcagaagtgatttccaaaggggaacttgtcagatgacttttgttttcacataactttcattggcttctgactcttggccatcacagataaacttagattctaagtaaaagtacagatttgctgtggaagagccaaaagcagcgtccatctcttcctttcagtccctgagtgcctcctacatagaatgtctggagctgccacgactctcagtcagtgggtaaatattaaacagccccagggacactttaagaacaaagttgatgcaaaggatttggttcatttaaataaaggtaaaacaaggaaatctcagggagaaaactcccagtggtttgcagtaaatgagcagggattgtgacccagttattgtcgtgatcacaagccacataaagtagtgagggcaggtttatcttcttcaattttataacctaagaaattgatttacacaaagaaagtgattttccctagacaagagagagagtaaaatggtcatagaaggacctgaagcagatcctttcacagtaaatccagtgctcacttctttatactgcgaggctttctgtgagggagagctaataacctgtagggataattaaacagtaaatcagattaccattatatattacataaccttgataatggggtgctattaagaatctgatagtaaatctctggcacagatgcattagaaaatgacctactgaatgcagcatgtttcaccagatggcctttgaaacaattttctttctctacatgtccatgatacagtggcttctgagagcatgttaatcagtatcctgtggcctttgagagtcaaggccctttagtggtatgaatgaggtgttgtttaaaacacacacacacacacacacacaatgtaaatgtcagatttcgttaccatattcttacttgattaggagacatgtttatttttaagtgaaggagtggcattgttcaaatgccttaatccaaagatttagtaatcagtcctaagagggtttaaaaggaattcacactgcctttgtttcaggtactatttacacactgactcatttaattcccataacagctttgagaagctggcttcattaatcatactatcaataacacattgaaattctgccccaagtcaagtgactaagtggaactgaaactcatgtcttctccttatttcctacactcacttgcagcaccaaacagggatcagaatcagtgggaatttcagatgggctgaaagccacttgtccgaggtggtatagacccagggtcagcacacttttcctaattcgagggccagaggcaaattaggccaagaggcaaaattgaggctcttaattaagtaattactaataataaccgtttaaaagacagaaaaaccattcttaattcatgggccatacaaaacagtctggcagtcatcttcatcctgcaggacctagtttgctttgatctggacagcctggaggaaagctggccccatgcaaatgtcaaatagatgtactgaaaggttgattgtggctctgaggttctgatttaaaacccagattttagcttattactgagtatattttttcaaattctgagatctcatcttctatttttggggcccatacaattggcttagctttttattacctttaattagagaattgtactagtatgttgaatttcccccaatggattatattaaatcaacctggatggctttcgggtatctaagcagagttcaggttagttctctgcaggcagtttcattcctttggagactagaaaaagatttgtgaggaatacttatttaacgtgcattacaaggtagaaaatcatggtggataaatagagaattccagaacttgaaaggacttgtgaaatctttgagttcatcttccaaatccaggaacttttctaagaaaatccttataatacacaccacacacaaacacacacacacacaaacatttattgagcacctatttcatgccagatattgccctgcatgcatttatgtatgtaattttagtaaaactcccatcactcatgtaagagataaacaaactcagccaaaccgtatcaataattgtgttgctagcaccagatggttcataaaggatactgtctttcattttggggagtagaggaaatgtgttcaatatccagttatttgcagcaaagagtaatataagttaccttttttactgcatttcttctttgtttgtttgttcgttttgccttaagtgaagataagcatatttatttttacagaattgtctggctagaatttgccctttctagaatgtaaatgtcatttaaaatccaataatattcctttatacaacgttttctttttgagggagaaagaaatgcaaacaatacattctacggaaaaaattccatgttcattatctatgcctatgaggattacattcttagctgcaaaggccaaaggacgaaatttaaggcagaaagtcgttttcctttttgttcggcatgttccctaagctgcagtaggttttccattctctgggatgccattgccatccatttaaaatgctactttcaattataatttaaacttatgtgaatacatttccaggaaaaagctaatattaggcagtgtgaaatagcagacagaacaggctgtggatcaggagccttgggccccaactttccaacttcaccccagcttcatccctatgtcatcctgaatgtatctctttacctctctggacctcagcttttatctataagacaagagatttagagtagaagatagcttaatgttcattcccatgctgatatttcataatttacttaatgtaaatttaagaagtatcttggggaactgaaatataccttacactgtattttttttctttttaatttagtttggccatctattatctcaatgctactgccaagggccagaaggcagcgaatctggatctcaaaaagaagatgaaaatggtatgatacaatttatttcatagaaatattatctttattaatgtcaagcagtagaaaacactgagaaatctacttttttccccttattttttattgtgtagcaagctttggagaacaaaatgcgaaacaagaaaatggcagctgcacgagcaggttggagatacgtttatgtttgtaatgtttgtaatttttctttttctttttctttcttttttttttttttttgctttttctccattggatggtgagtggcattattgctgtgagcgagtcattccacaatccttaccttccacctttttagcccttctcaggcatcacatccagggtatttggttgttttctagtgggaggaaaaaaagagaaatgaaaatgtgggcatataaacttggcagtagtgatttttaaaagtgaccttgaaaatgcgcagaaaatgaagaaatcccccatatagtcgtctacaaacagcagatacaaatgcagatgctctcctgcccatgttgactattttcatacatggaaggatatggcaagaagatcccaagagggtcctctgggctttccaccactgattgccagaagccctttctaatccattaaactttctttttttaaaaacctctttattttttaaagtattagagtaaagccaacttctagttgccaaaattaataatatgctttgagttccccacggaaaggtgatacctaagacctttagtgaaaatcttttccaactttgtccttactcctaactttaaaactctttacattagtaggactgtttccccactgtaagtaataaaacactcaaattggtttaattgagaaagagtaatttattcgaccacacaaatgcagggaaatggtatgtatggcttcaggccactttcttttttctatatatatatatattttttaattatactttaagttctagggtacatgtgcacaacgtgcaggttagttacatatgtatacatgtgccatgttggtgtgctgcacccattaactcatcatttacattaggtatatgtcctaatgctagccctccctgctccccccaccgcacgacaggccccggtatgtgatgttccccttcctgtgtccaagtgttctcattgttcaatttccacctatgagtaagaacatgcggtgtttggttttttgtccttgcgatagtttgctgagaatgatggtttccagcttcatctatgtccctacaaaggacatgaactcatcattttttatggctgcatagtattccatggtgtatatgtgccacattttcttaatccagtctatcattgttggacatttgggttggttccaagtctttgctattgtgaatagtgccgcaataaacatacgtgtgcatgtgtctttatagcagcatgatttataatcctttgggtatatacccaaaggattttttttcttttttgagacctggtctggctctgtggcccaggctggagggcagtggtatgatctcggctcactgcagctccaacttcccaggctgaagtgatccttcctcctcagcctcctgagtagtggggacagcgcacaccaccatgcctggataatttttaattttttttttgaagtgaggtcttgctaagttgcccaggctgctctcaaagtcttgggctcaggtgatcttctctttttggcctcccaaagtgttgggattaaaagcatgaaccactgtgcccagcattcagggcactttttatcctaagtttagaacagagtcaggtctgagcccacctctctgtgaatctctgaagctaaactcctttcacattggctgacctttatggcagcaggaatggatgcagcaacttccaatgccatgtccttagactgtaaaacttctttcctagaaattcctcaacctctcctcctttcagattggccccatatgggtcatgtatccatccttgtgccagtcactgtgtctgagtatggtaagttactgaagtcagtcaggacccatccttgaagctgggattggtctgttttcctgacacatgtgaaatgcactggggaggtcacacctacctaagagaaggagaaaaggatgctgggtgtccccaaacaacaaatgttcaagacttggttttgttgccttctttatgcttagccttttttcttttccctctctctatctagcatgcataaatgtaaagttgaatgctgggtgctgaattagatgattacagtgatgtacagttatcagactagtttttaatgaaatttttaattttttaaatcaatactacatgtgtgcataatttagagttccatttagaatttcataattctataaggcttatcatgaaaaacagcatcttcttctgcctcctacaccagttttgctctcttctcctcccctgcactcaaataccctaagacaaacactttcaatttgttagttgatttttagatatttatctccaaattacctaattttgttgtaatttcttgactttttagttttaagtattatctcttaaaattattaactacaatggatataataattttaatagataatatttaaacgatttttatactcttgccccagtctttctatgcattctacctatgtagttatattattattttggttaggccagtatacattattatggacacacagtcttcacagctaagccaagtagtaaactatgatacttgtgcatactttaaaattttctcaggattcataattcataatttctctttttaaacattttcttatttttatatatgtttcagtgatgcatttaatttccaaatctctgctatttattgagttatactctcaatatattcagacatattgggttatctgtccatttcatttccttagagaaatctttcccagaatcttctgcacttctccaatttcaactagtgtgtgtctgggatacagctgtcatcctttcatttttcttcactgtcattcaacaggatctctgtcactttatcctgttttggatactgtgttttccattttccccaacttcctctcttttggtctgctcacattttgccagtaagaaagggtatgtgagaggcaaattttctgagaccatgcctatctgaaattgttcttctcttactctcccttttgactgatagtttgggggtcaaaaatactcatctaattatattagaaataatatcccttcaaaatagtattttttcagaggtttcccatgccttttagattccacaattgctcttgagtagtttaaagccattgtgattcttagtctttcttgagcaacttgtatttttgattatctgtttggttttccaatctggaaagttctagggtctccttatctgcatgttcagaatttcatgatggtgtatcttgcatggatctatttttattccttgtgtactcatcaatggacttttgctctttggttgaagggaattttcttgaattgtttacaaattctttccatccattttctgtttttttttttttcatgtagaatttctaatttatttttcatccttaaattccctttgtctctttgctttacctatgaacatttccttatctttaaattttaacatttctcttggccttttcacttttgctatcataattttagtttctgcaagctgttttgttctttaattcttcttttttaaacagcatgctgtttttgtttaatggctgcaatggcttgttttgtctttatgagaatattaataactctttttgatgtttctttgcctttgatagtctgttttctctaagctgttttgttcttctttctcccctgcttggtaattcccctgctttgtgaccctcagctcatatttcagggtaggatgcaaaggtgggtttcgaagctttaagcacatggatggggcttgtgggcagatcctcattgggggactctgcctgggctgccgctgaacccccatgtcagtatttttaggcttctcctcttaagctgatcagattcctcagaaaaattacttccgaactcctgcccagagagtaaagatttgcctggcaaatctgtagcacctgagtgggaaaaacaacacgggtggggctcagctttcaacctacaaatgctcacttagccccctctttttactgcggcactccttgtggtcttctaacccagaagcatctctgttttactctttttagaaaaaattattccagtcttctgccagattaaaggtagtgggggttggggagcaattattcatttgtaccaagtgaagccgatctcagactctaactgctgctgtttcgttttttaataacccccacccctttgccccaccaagcttgactgcttcttaacagctaaaacatcctctttgtattggttccttacttccagaggtacctgttgctgcaaattactgaacgtttcagagattttatgtgtaaattatgttgcttactgtctttttcctcccctggcttagcttttcagtttgttagaattgataagtcattatcattaatctgtctgctttccagcttctaaaattttgtcattgatgtctcttcccctattctccccctccttgcaggtttatgcaaccttctccatcttcctccccaaccccctcaaaatttcttgactgtcatgtttgtgaaagggtgaaagttcaattcaatgtatttacctccgcagtttaggcaaacctttgtatttcctacactaggagaacaatggttttatgtccatcttcactctgttcatcccacagtgcttacctgaggtattattttgaaatagagtctgggatggagtctaccttagtgagaatttattagaattgtttagtctctgcagaagatgaggtggttgaagcacatacatcacatatactagcagtgcttttgtataatttaatattatcaaattagtacttaagaatggaaaattctgacttataagatctaaattctaattaaggcttattgttatctttattgttttaaatgataatataatgctatagcatgctattcatctgatattttttccataatgtgtatggccacccagtaaacacctactgaatatctactgaaaaatgaggaactcttttgttggaaaaatataaaatattcatcacataagcaataatgtataaatgttacaaaaaagtagtacattcattctgccttgtttagaatatgtgaagcctttgcaaactaagaaacatggaaatattttgaacattaaaatggtaaatattatgggaaagtagagcacatttggacaatacagatttctggccacctcattcagaaccattaagcacactgaaagctacgtttttatttgcctcctgttcatcttctctctctctctccttgttttttttttttttttttttctgttttgtgaacagctgcagctgctggtcgccagtaataagtatcctgagagcccagaaaaggtacactttgccttgctgtttaaaagtaatgcaatatgtgaacgcccagagaacaagcactgtggaactgctattttcctgttctacccttgatggattttcaaggtcatgctggccaattaaggcatcatcagtcctacctgagcaacaagaatctaaactttattccaagtcagaaactgtttctgcagagccactctctcccctgctccatttcgtgactttttttttttttttaacaaattgagtttagaagtgagtgtaatccagcaatacagtttactggtttagttggtgggttaattaaaaaaaatttgctcatatgaactttcattttatatgtttcttttgcc

SEQ ID NO: 51 - protein, 352 aa, Homo sapiens
MFAAATKSFVKQVGDGGRLVPVPSLSEADKYQPLSLVVKKKRCFLFPRYKFTSTPFTLKDILLGDREISAGISSYQLLNYEDESDVSLYGRRGNHIVNDVGINVAGSDSIAVKASFGIVTKHEVEVSTLLKEITTRKINFDHSLIRQSRSSRKAVLCVVMESIRTTRQCSLSVHAGIRGEAMRFHFMDEQNPKGRDKAIVFPAHTTIAFSVFELFIYLDGAFDLCVTSVSKGGFEREETATFALLYRLRNILFERNRRVMDVISRSQLYLDDLFSDYYDKPLSMTDISLKEGTHIRVNLLNHNIPKGPCILCGMGNFKRETVYGCFQCSVDGQKYVRLHAVPCFDIWHKRMK

SEQ ID NO: 52 - DNA, 1059 bp, Homo sapiens
  source 1..1059: mol_type = other DNA
atgtttgctgctgctaccaagagctttgtcaagcaagttggagatggagggagattagttcctgttccaagcctcagtgaagctgacaaatatcaacctctaagtctggtggtaaaaaagaagcgatgctttctgtttcctagatataaatttacttcaacaccttttacactgaaagatattctcctaggagacagagaaatttcagctggtatttcatcttatcaattactgaattatgaagatgaatcagatgtttcactctatggaaggcgaggtaaccatattgtaaatgacgttgggattaacgttgctggatcagattccattgcagtgaaagcttcatttggtatagtaaccaaacatgaagtggaagtatcaacattactcaaagaaattactacacgaaaaattaactttgaccacagcttgatacgtcagtcaaggagcagcagaaaggcagtattgtgtgtggtcatggagagcatccgaaccacacgacagtgctcactgtctgtgcatgctggaattcgaggggaagcaatgcggtttcactttatggatgaacagaatcccaagggaagggacaaagctattgttttcccagcacatacaaccatagctttcagtgtttttgaactcttcatatacctggatggtgcctttgacctttgtgtcacttcagtgtcaaaaggaggatttgaaagggaagaaacggcaacatttgcactgctgtacaggttgagaaatatcctatttgaaagaaatagaagagtgatggatgtcatttctcgttcacagctttacttggatgatcttttttctgactactatgacaaacctctcagcatgactgatatttcactcaaagaagggacccatatccgagttaacttacttaatcacaacattcccaaagggccttgcatactctgtggaatggggaacttcaaaagggagacagtttatgggtgctttcagtgttctgttgatggtcagaagtatgtgagacttcatgcagttccttgttttgatatttggcacaagaggatgaaataa

SEQ ID NO: 53 - protein, 355 aa, Homo sapiens
MAFAWDAAPLSFVKQVGDGGRLVPVPSLSEADKYQPLSLVVKKKRCFLFPRYKFTSTPFTLKDILLGDREISAGISSYQLLNYEDESDVSLYGRRGNHIVNDVGINVAGSDSIAVKASFGIVTKHEVEVSTLLKEITTRKINFDHSLIRQSRSSRKAVLCVVMESIRTTRQCSLSVHAGIRGEAMRFHFMDEQNPKGRDKAIVFPAHTTIAFSVFELFIYLDGAFDLCVTSVSKGGFEREETATFALLYRLRNILFERNRRVMDVISRSQLYLDDLFSDYYDKPLSMTDISLKEGTHIRVNLLNHNIPKGPCILCGMGNFKRETVYGCFQCSVDGQKYVRLHAVPCFDIWHKRMK

SEQ ID NO: 54 - DNA, 1068 bp, Homo sapiens
  source 1..1068: mol_type = other DNA
atggcgtttgcctgggatgcagcacctttgagctttgtcaagcaagttggagatggagggagattagttcctgttccaagcctcagtgaagctgacaaatatcaacctctaagtctggtggtaaaaaagaagcgatgctttctgtttcctagatataaatttacttcaacaccttttacactgaaagatattctcctaggagacagagaaatttcagctggtatttcatcttatcaattactgaattatgaagatgaatcagatgtttcactctatggaaggcgaggtaaccatattgtaaatgacgttgggattaacgttgctggatcagattccattgcagtgaaagcttcatttggtatagtaaccaaacatgaagtggaagtatcaacattactcaaagaaattactacacgaaaaattaactttgaccacagcttgatacgtcagtcaaggagcagcagaaaggcagtattgtgtgtggtcatggagagcatccgaaccacacgacagtgctcactgtctgtgcatgctggaattcgaggggaagcaatgcggtttcactttatggatgaacagaatcccaagggaagggacaaagctattgttttcccagcacatacaaccatagctttcagtgtttttgaactcttcatatacctggatggtgcctttgacctttgtgtcacttcagtgtcaaaaggaggatttgaaagggaagaaacggcaacatttgcactgctgtacaggttgagaaatatcctatttgaaagaaatagaagagtgatggatgtcatttctcgttcacagctttacttggatgatcttttttctgactactatgacaaacctctcagcatgactgatatttcactcaaagaagggacccatatccgagttaacttacttaatcacaacattcccaaagggccttgcatactctgtggaatggggaacttcaaaagggagacagtttatgggtgctttcagtgttctgttgatggtcagaagtatgtgagacttcatgcagttccttgttttgatatttggcacaagaggatgaaataa

SEQ ID NO: 55 - protein, 354 aa, Homo sapiens
MYVYRLLSITVLMDILLEGLHSQYFTIYELRITPMAKHFSTQSFVKQVGDGGRLVPVPSLSEADKYQPLSLVVKKKRCFLFPRYKFTSTPFTLKDILLGDREISAGISSYQLLNYEDESDVSLYGRRGNHIVNDVGINVAGSDSIAVKASFGIVTKHEVEVSTLLKEITTRKINFDHSLIRQSRSSRKAVLCVVMESIRTTRQCSLSVHAGIRGEAMRFHFMDEQNPKGRDKAIVFPAHTTIAFSVFELFIYLDGAFDRRVMDVISRSQLYLDDLFSDYYDKPLSMTDISLKEGTHIRVNLLNHNIPKGPCILCGMGNFKRETVYGCFQCSVDGQKYVRLHAVPCFDIWHKRMK

SEQ ID NO: 56 - DNA, 1065 bp, Homo sapiens
  source 1..1065: mol_type = other DNA
atgtatgtatatagattactatccatcactgttttaatggatatcttattggaagggctacatagtcagtatttcacaatatatgaactccgcataacacctatggcaaaacatttcagcactcagagctttgtcaagcaagttggagatggagggagattagttcctgttccaagcctcagtgaagctgacaaatatcaacctctaagtctggtggtaaaaaagaagcgatgctttctgtttcctagatataaatttacttcaacaccttttacactgaaagatattctcctaggagacagagaaatttcagctggtatttcatcttatcaattactgaattatgaagatgaatcagatgtttcactctatggaaggcgaggtaaccatattgtaaatgacgttgggattaacgttgctggatcagattccattgcagtgaaagcttcatttggtatagtaaccaaacatgaagtggaagtatcaacattactcaaagaaattactacacgaaaaattaactttgaccacagcttgatacgtcagtcaaggagcagcagaaaggcagtattgtgtgtggtcatggagagcatccgaaccacacgacagtgctcactgtctgtgcatgctggaattcgaggggaagcaatgcggtttcactttatggatgaacagaatcccaagggaagggacaaagctattgttttcccagcacatacaaccatagctttcagtgtttttgaactcttcatatacctggatggtgcctttgatagaagagtgatggatgtcatttctcgttcacagctttacttggatgatcttttttctgactactatgacaaacctctcagcatgactgatatttcactcaaagaagggacccatatccgagttaacttacttaatcacaacattcccaaagggccttgcatactctgtggaatggggaacttcaaaagggagacagtttatgggtgctttcagtgttctgttgatggtcagaagtatgtgagacttcatgcagttccttgttttgatatttggcacaagaggatgaaataa

SEQ ID NO: 57 - protein, 193 aa, Homo sapiens
MESIRTTRQCSLSVHAGIRGEAMRFHFMDEQNPKGRDKAIVFPAHTTIAFSVFELFIYLDGAFDLCVTSVSKGGFEREETATFALLYRLRNILFERNRRVMDVISRSQLYLDDLFSDYYDKPLSMTDISLKEGTHIRVNLLNHNIPKGPCILCGMGNFKRETVYGCFQCSVDGQKYVRLHAVPCFDIWHKRMK

SEQ ID NO: 58 - DNA, 582 bp, Homo sapiens
  source 1..582: mol_type = other DNA
atggagagcatccgaaccacacgacagtgctcactgtctgtgcatgctggaattcgaggggaagcaatgcggtttcactttatggatgaacagaatcccaagggaagggacaaagctattgttttcccagcacatacaaccatagctttcagtgtttttgaactcttcatatacctggatggtgcctttgacctttgtgtcacttcagtgtcaaaaggaggatttgaaagggaagaaacggcaacatttgcactgctgtacaggttgagaaatatcctatttgaaagaaatagaagagtgatggatgtcatttctcgttcacagctttacttggatgatcttttttctgactactatgacaaacctctcagcatgactgatatttcactcaaagaagggacccatatccgagttaacttacttaatcacaacattcccaaagggccttgcatactctgtggaatggggaacttcaaaagggagacagtttatgggtgctttcagtgttctgttgatggtcagaagtatgtgagacttcatgcagttccttgttttgatatttggcacaagaggatgaaataa

SEQ ID NO: 59 - protein, 193 aa, Homo sapiens; identical to SEQ ID NO: 57

SEQ ID NO: 60 - DNA, 582 bp, Homo sapiens; identical to SEQ ID NO: 58
  source 1..582: mol_type = other DNA

SEQ ID NO: 61 - protein, 352 aa, Homo sapiens; identical to SEQ ID NO: 51

SEQ ID NO: 62 - DNA, 1059 bp, Homo sapiens; identical to SEQ ID NO: 52
  source 1..1059: mol_type = other DNA

SEQ ID NO: 63 - DNA, 10131 bp, Homo sapiens
  source 1..10131: mol_type = other DNA
tttcttgccgggagagagggattagagggattgtccggcgtgggtctagggtcgttgaggcctaaagttaagcctttgtggggaggacggattgggggctgggtcactttaagaaaaagattctaaaattacgaaggcagaattccagggagtctcccgggcctggtcctgaagcttgagaccccggatatatacgctccagggggctgcggtgcgctcttcgggtccccgagccctgtgtttaggaacacgcggggacgtccaaacacccgctcctctcccgccgggcgggctcctttgtcttctgggctttcgtcgcgagatggaacgctgggtcagtgcatcccagcaaaacacgttaggagtaaacgaaggcctttccggggacctgggtagtcggttgtaatggcgtttgcctgggatgcagcacctttggtgggccattagatgacgtgtcgcttctccaggggcttgctaggcactagcagaaatgctcccctgtgcttactcggtgttatggaagattgcttgcacaatgctattcgtacgaaaggatattattaaaagtgatttatgggcgggcgcggtggctcacgcctgtaatcccagcactttaggaggccgaggctggcggatcgcctgaagtaagcagttcgagaccagcctggccaacatggtgaaaccctgtctctactaaaaatacaaaaattagccgggcgtggtggcatgcgcctgtaatcccagctactcgggaggctaaagcaggagaatcgcttgaacccgggaggcaaatgttgcagtgagccgagatcgcgccactgcactccagcctgggcgacagagtcagactccctctcaaaaaaaaaaaaaaaaaaaaaagcgatttgttgttttgttagcatgtaagccctggatgcttgaaacaagtgaaagatgttcagaatctaatcaaattatatcatctgatgctttaattagagcctattctctcttcctctccgtctatatatgtatgtatatagattactatccatcactgttttaatggatatcttattggaagggctacatagtcagtatttcacaatatatgaactccgcataacacctatggcaaaacatttcagcactcaggtaaaattcattttttgccacaaaattacttaaaaacaggccagaactttatatagctcttgttaaaggttaagtagctgggataataatgaaacaaaaagatgcagcaggactccatttcaaagagagagagtctgtgtgcccaacttcagagtaagaaaccactaggtaatagtttatatagttacttatatgtaatgtggctttattttttaaataaagatttgcatataattgtttatatctgtgaatttatatttaatattaaacacagttttgtaagcatataagatggaaaatgaatgaaatgctcaatcaatgagctgtatgccatgaggattcaaaacagcactttggtgttgccaaaattccggtggtggacttgtgaaggaattccctttggactaggtccactgtagattgtatccgggactatcgttagtgcctaaattgcattgcttcccacagcactatatgcttcccttaaaattggcccattgccagtggcaaatcactatctactgtgatccttatcatagacattggtcatatttttacgttattagttttctgtgtatattttagtgctatagcctgccattccaagttaaacatgctcttagcatatcattttacaccgttgatctataattcattacctgagcacatgagcagaggcagggaattatacagtggtaaactacttggtgaaaccatgctttgtatttttaagatgtataattatatttaaaaacaagcaatgcttaattttgtgcctgattttcctctttaaaaatggatttatctgggggttgcagttgatgacgttttgattttaatatgtttgctgctgctaccaagagctttgtcaagcaagttggagatggagggagattagttcctgttccaagcctcagtgaagctgacaaatatcaacctctaagtctggtggtaaaaaagaagcgatgctttctgtttcctagatataaatttacttcaacaccttttacactgaaagatattctcctaggagacagagaaatttcagctggtaagtttaaatgtttgggagtgccaactcattcatctgtattattggcaacctaaacataggtcatatatgctacttatgttagtaatacacattttcaatgattaaagcaacttttattatgatgttagtgtaataacattattaagattaacaatgccaaaagtttgtataatatcaaatctcttattggtcaaataattttcaaatctatcaattattttataaattgttttaaccaaatcaacttagaatatgacatatttcttcatctataaaatgggatattatttgggcttacctatgttacatggtcaaatgagatgaaaataatttgtatttattttttacaattcaattattacaattggtaaactgaaatgtattgaagggtaggttatataataagctgatattttgatgagttactacttataaacgcttattttttcttttaattgcccggtggatcttgatgcttaagaagttctgttggctgaatagaaaatttgagttccttttaagaattctggctatgtgtttctttttgttgtaagattaattgaattactactttaagtcttggtgagtcatgttgcctttctctaacatttgggtatttgagtcttcaattgttaatttaacatgttactatatataatctacataagataaagatgtttaaaaaatactgagtttcttcttataaaggtatttcatcttatcaattactgaattatgaagatgaatcagatgtttcactctatggaaggcgaggtaaccatattgtaaatgacgttgggattaacgttgctggatcagattccattgcagtgaaagcttcatttggtatagtaaccaaacatgaagtggaagtatcaacattactcaaagaaattactacacggtcagtataataatcctaatatatttcagtgttttcattaaatactttaggtatataaacttcattacaaagaatgcttaaaacattgaggttgtattttactagtgtaatttgctagatatgtttgaaatacattggtagtatatccaaactttgaataaggatagatatcaaaaatcacttggctgaagtcagagacctcagggccccagatcaaggagctaactgatgaagaggcagagaggctgcagctagagattgaccagaaataggatgcagagaatcatgaggcccagatcaagaatggcagccttgactccccagggaagcagaagactgaggaagatgaggaggaggaagatgagaaggacaaaggaaaactgaagcccaacctaggcaacagggcagacctgcctgattaccgctggaccaagaccctgtcggagctggacctggcggtccctttctgtgtggacttccagctgaaagggaaggacgtggtggtggcatccaacggcggcacctccaggtggggctcaaggggcagccagcgatcatcgatggggagctctacaacgaagtgaaggcggaggagagctcgtggctcattgaggacggcaaggtggtgactgtgcatctggagaagatcaagaagatggagtggtggagccgcttggtgtccagtgaccctgagatcaataccaagaagattaaccctgagaattccaagctgtcagacctggacagtgagactcacatcatggtggaaaagacaatctatgaccagtaacagaagtccatggggctgccaacctcagacgaacagaagaaacaggagattctgaagaagttcatggatcagcatccggagatggatttttccaaggctaaattcaactagcccctgtttttccctccctgaactcttggggctgagctgcaaccacccaactttctttcccactcttctctgggacttgtgggcctcagggcttggggcaggcatgggactggcccaggcacacaggtcccagggcatcaggagaaaggctggggcttggggtcttgtcctccccagttggcctactgttacacattaaaatgatttgcccagctaaaaaaaaaaaaaaaccacttggcttaaacaaaacttttaattgttccacaaaattactttggctctacacacatttgcttaattattagatttaaataatacagcaatctgtctgcaacaaatagagtccccttcaacagactttcaacagacagagtgaaacattctgcataagcatgttttaagaaaatagagaggagagacaaattattacatttcttttgggtgtattttctgactattaggattgccttgatttactattaggtgaactatgaatgaataacacatgatagcaaaaaatgtatttgattatgtgtaattagatgttatagagtcttgtgaatgtatcttctttattttagaaaaattaactttgaccacagcttgatacgtcagtcaaggagcagcagaaaggcagtattgtgtgtggtcatggagagcatccgaaccacacgacagtgctcactgtctgtgcatgctggaattcgaggggaagcaatgcgggtaaaccacacttgttgggttctcttactaactaaagtgttgccatgggaatttttttaagtattgaatttctagtcaggcttgtgtattttgtgaaatgttctgatgaaagagctgcagttgtataggattttgcacagcaatgtctgttctagaatatgaaaaaaaaaaacaaatcttgggattctaaacatgtgtaatataatgcaaaaacagtaatccttgtgaaattacgtgcatactggagtccctcaagttactatttaagtgttgttttaagaataaaaattgagtgagttgaattgattttatttttaagtgatacagtttttgactgggcacagtggctcacgcctgtaatcctagcattttgggaggccgaggtgggcggatcacttgcagtcaggagttggagatcaagttgggcaacacagagaaaccccatctctactgaaaatacaaaaattagccaggtgtggtggtacacccctgtaatcccaagccactcaggaagctgaggcacaagaatcacttgaacctgggaggtggaggttgcagtgagccgagattgtgccattgcactctaacctgggtggcagagtgagactccgtctcaaaaaaacaaaacaaaacaaaaaccccaaccaaaaaaaaaatgtgtaacataatgcaaaaacagtaatccttgtgaaattacatgcatactggagtccctcatattactatttaagtgctgttttaagaataaaaattgagtgcttaagttgaattgatttaagtgatagagtttttacactttgaattttttaaagctgaatttatagattttttttttgagacggagtctcgctctgtccccgaggctggagtgcagtggcgcgatcttggctcactgcaaactccgcctcccgggttcatgccattcttctgcctcagcctcccgagtagctgggactacaggcacctgccaccacgcccggcagtgttatccaggatggtttcgatctcctgacctcgtgatccgctagcctcggcctcccaaaatgctgggattacaggtgtgagccaccgcgcctggcctgaatttatatttttatattcaaatagtttttcaaagttaatattatcaatggccatacatgctttattcaaggttagttaaatcctttaaaaaatattagcggcaaggtgcagtggatcatgcctgtaatcccagtgcttaggaagactgagataggaagacagcttgggaccaggagttcaagaccaacttgagcaaaataatgagaccttgtctctacaaaaaataaaagaattagctggttgtggtggcacatgcctatagtcccagctactcggaaggctgaggcagggggctgcctgcggggtttgggtcattgtcttttagaatttgggaggctttgaaaagccgtgcttttgtgctggggaagatgtagcagtctcttctccaaaccacccatttgccttcggacttctctggggccagcagccatccaactaggggcccggggccacgggctcagctgacgaccatgggcttcgcgtccaaccagcagtttgcaggttcgagctcaggacttggcggggacaccttaggatgcaggagtggccaggagttcaaggttacagtaggctatgattgtgccactgctctccagcctgggtgacagagagagaccctgtctctgaaaaaaaaattggaaaagtatctgtgtttaattttcagctcaattatgatattgtttatctttgtcattcagtgacacctaataatgacttgattggattaaaaccaattgttagaaagatagggttcaaggataatcttttcaagtctttgcaaataaaagttattttcgcatattcagctgcctgtcaaattctgattaacattggatcatttttgaggcacaaactgaaacatttacttgattgttagcgattgctttagaaagctactaaaagctctggagggctttggaatggtagacaggctaggctgaaaactttaactctggcactgctttctaagatttcctgttaaaaaaaaaaaaaaggcttctgctccagagcattatggttgtggtagcactaatcatgggctgtaataccaaagtaagtgaaaagtgcagaggtatttcctaatatagaccaggagtttctgttggaccaattggatctctgctataaaaaatggtttaattcaagcagaataatcctttacttgggaattttttgttttgtttttggtaggattataggaaatgtttcatttctccaaaaagctatccttacatgttatgatccttaattatgttatttatttattcaatatagtttcactttatggatgaacagaatcccaagggaagggacaaagctattgttttcccagcacatacaaccatagctttcagtgtttttgaactcttcatatacctggatggtgcctttggtgagttaagggtctgcatgaaatacaaatgattatatttttaaggagcattcattagggcatgtgctctctctctctcttttctctcatttctcgtgtctaacaattatagaagatgctctcagcactgtcaatcttatgctttggcaaaatagctgagaaagaccctccgttcgctgcttccccattccacttttctgcttcttggtgaaggttgtaaactctccactaccccatttaaaattataaataagagctaaaatgccatctactgacaaagtattccttagcttacatggggagataataaatgaccttcttataggtagtttttgatggtggcaaacagaggagtaggtagatagtaggatgcctgaagtgttaggatgcccaaaccagggcctctaaagacagcttttcttacttcagttttacttatcatagacccagcttccccttgcactcttcctaaaaaataactttaaaaagtgaaaatacttcctccaaaattgtcaccttgtataatacctaagtgcagctcactttaggtctctacatttcacaggtctttaaggtctgttggccaactggaacaagtccaggtgtagcccaagggatcaggaaaggcagcccctagccatggtaatttacaaatgtttttagacctgttcttgttcatttctgcaattttgtaggaggagggaatagggagtccagaaacaaaacaaaactacatgttaagtaaattgtctttttaaaaaatatttttaatttttgtggctatatagtagattatatatatatttatgtatgggatacatgaggtattttgatacgggcatacagtgcataataatcacatcatggaaaatggggtatccatcccctcaagcatttatcctttgtgttacaaacaatccaattatactcttttagttatttaaaaatgtacaaattctcagtctaagatggagaaaaaactgtacaattacattattttgactgtagtcaccctattatgcttccaaatactaggtcttattaagtaaattctaattggataactttaggtttttacagttttattgatggttgggaggaatgtaaatggactgatatatccacaagaatttaaaatatatatataatttggacttccacttctaggaatttatcctacagatatatttacacatatatgaaatgatatgagtgcaagtatattcagtcctcaataacaagagattggaaacaacattaaggagactaaataatggtgcatccttgcaagagaatactatgaagccaataagaatataatacttttaatagatatttttcaagagctgagtataatatgtaactatttgggcataaataattttatacacatacatgtatatatgcatctttctttatgcttataaaatatatggagtatttctggaagcaaacataagaaacttaaaccacgggtgcccctaagcccctgaggtagaagactgtggctggatacagggtgggccagagacctatttgtcactgtatctcctttctgtatgaattttgtaccatgtgaatgttaccttttccaaaagtatgtaaaagtcaacttttaaaaacaatacaatgaatgatttgtactagaattcatcaccccatcaaacaataaaatatgaattattcaagttataacatcttctaacaattttttttgtagacctttgtgtcacttcagtgtcaaaaggaggatttgaaagggaagaaacggcaacatttgcactgctgtacaggttgagaaatatcctatttgaaagaagtatgtttattgaagagtactgtgaatgtcttttttttttctttcctggcttaacacatgaggttttctattcagtaatctcatctgttaaggaaaaatttaaatttaaaagcctggctggtatggtggctcatgcctataatcccagcactttgggaggccagggcaggcagattgctagcactcagaagtttgaaacacttgggcaatgtgagaaaaccccatctgtacaaagaatacaaaagaaaaaaaattagttggttgcagtggtgtgcacctgtagtcccagctacttgagaggctgaggtaggaggatcacttgagcgtgggaggcggaggttgtagtaagtggagattgtgccactgccctccagcttgggtgacagagccagaccctgtctcaaaaaaaaaaaaaaaaaaaaaaaagccaaattatttcatgactagtggattcacatatttattaatgctgtttgcattatgtatttttcattttcacttctaacacatttcttttctgtttttgtccttttagatagaagagtgatggatgtcatttctcgttcacagctttacttggatgatcttttttctgactactatgacaaacctctcagcatgactgatatttcactcaaagaagggacccatatccgagttaacttacttaatcacaacattcccaaagggccttgcatactctgtggaatggggaacttcaaaagggagacagtttatgggtgctttcagtgttctgttgatggtcagaagtatgtgagacttcatgcagttccttgttttgatatttggcacaagaggatgaaataaaatgaaaaatgaatacaccgtgttggtgttttaggtgcagttgtgccacaaaccttccctaaattatctaggtttgctttgatgaattaaattaaaatgagaaaagcaaaaagaaattaacctgtctgggtatcatattccctatctataaagtagcaattataacagtagtgtctatttcttaagttgtcatgaaaattaataacattgtttatatcaaaaaagatttacatataaaattcagagattatgaatcatgccagtcactttagaatcatttttgggatgtagt

SEQ ID NO: 64 - protein, 641 aa, Homo sapiens
MAKAAAIGIDLGTTYSCVGVFQHGKVEIIANDQGNRTTPSYVAFTDTERLIGDAAKNQVALNPQNTVFDAKRLIGRKFGDPVVQSDMKHWPFQVINDGDKPKVQVSYKGETKAFYPEEISSMVLTKMKEIAEAYLGYPVTNAVITVPAYFNDSQRQATKDAGVIAGLNVLRIINEPTAAAIAYGLDRTGKGERNVLIFDLGGGTFDVSILTIDDGIFEVKATAGDTHLGGEDFDNRLVNHFVEEFKRKHKKDISQNKRAVRRLRTACERAKRTLSSSTQASLEIDSLFEGIDFYTSITRARFEELCSDLFRSTLEPVEKALRDAKLDKAQIHDLVLVGGSTRIPKVQKLLQDFFNGRDLNKSINPDEAVAYGAAVQAAILMGDKSENVQDLLLLDVAPLSLGLETAGGVMTALIKRNSTIPTKQTQIFTTYSDNQPGVLIQVYEGERAMTKDNNLLGRFELSGIPPAPRGVPQIEVTFDIDANGILNVTATDKSTGKANKITITNDKGRLSKEEIERMVQEAEKYKAEDEVQRERVSAKNALESYAFNMKSAVEDEGLKGKISEADKKKVLDKCQEVISWLDANTLAEKDEFEHKRKELEQVCNPIISGLYQGAGGPGPGGFGAQGPKGGSGSGPTIEEVD

SEQ ID NO: 65 - DNA, 1926 bp, Homo sapiens
  source 1..1926: mol_type = other DNA
atggccaaagccgcggcgatcggcatcgacctgggcaccacctactcctgcgtgggggtgttccaacacggcaaggtggagatcatcgccaacgaccagggcaaccgcaccacccccagctacgtggccttcacggacaccgagcggctcatcggggatgcggccaagaaccaggtggcgctgaacccgcagaacaccgtgtttgacgcgaagcggctgatcggccgcaagttcggcgacccggtggtgcagtcggacatgaagcactggcctttccaggtgatcaacgacggagacaagcccaaggtgcaggtgagctacaagggggagaccaaggcattctaccccgaggagatctcgtccatggtgctgaccaagatgaaggagatcgccgaggcgtacctgggctacccggtgaccaacgcggtgatcaccgtgccggcctacttcaacgactcgcagcgccaggccaccaaggatgcgggtgtgatcgcggggctcaacgtgctgcggatcatcaacgagcccacggccgccgccatcgcctacggcctggacagaacgggcaagggggagcgcaacgtgctcatctttgacctgggcgggggcaccttcgacgtgtccatcctgacgatcgacgacggcatcttcgaggtgaaggccacggccggggacacccacctgggtggggaggactttgacaacaggctggtgaaccacttcgtggaggagttcaagagaaaacacaagaaggacatcagccagaacaagcgagccgtgaggcggctgcgcaccgcctgcgagagggccaagaggaccctgtcgtccagcacccaggccagcctggagatcgactccctgtttgagggcatcgacttctacacgtccatcaccagggcgaggttcgaggagctgtgctccgacctgttccgaagcaccctggagcccgtggagaaggctctgcgcgacgccaagctggacaaggcccagattcacgacctggtcctggtcgggggctccacccgcatccccaaggtgcagaagctgctgcaggacttcttcaacgggcgcgacctgaacaagagcatcaaccccgacgaggctgtggcctacggggcggcggtgcaggcggccatcctgatgggggacaagtccgagaacgtgcaggacctgctgctgctggacgtggctcccctgtcgctggggctggagacggccggaggcgtgatgactgccctgatcaagcgcaactccaccatccccaccaagcagacgcagatcttcaccacctactccgacaaccaacccggggtgctgatccaggtgtacgagggcgagagggccatgacgaaagacaacaatctgttggggcgcttcgagctgagcggcatccctccggcccccaggggcgtgccccagatcgaggtgaccttcgacatcgatgccaacggcatcctgaacgtcacggccacggacaagagcaccggcaaggccaacaagatcaccatcaccaacgacaagggccgcctgagcaaggaggagatcgagcgcatggtgcaggaggcggagaagtacaaagcggaggacgaggtgcagcgcgagagggtgtcagccaagaacgccctggagtcctacgccttcaacatgaagagcgccgtggaggatgaggggctcaagggcaagatcagcgaggcggacaagaagaaggttctggacaagtgtcaagaggtcatctcgtggctggacgccaacaccttggccgagaaggacgagtttgagcacaagaggaaggagctggagcaggtgtgtaaccccatcatcagcggactgtaccagggtgccggtggtcccgggcctgggggcttcggggctcagggtcccaagggagggtctgggtcaggccccaccattgaggaggtggattag

SEQ ID NO: 66 - protein, 641 aa, Mus musculus
MAKNTAIGIDLGTTYSCVGVFQHGKVEIIANDQGNRTTPSYVAFTDTERLIGDAAKNQVALNPQNTVFDAKRLIGRKFGDAVVQSDMKHWPFQVVNDGDKPKVQVNYKGESRSFFPEEISSMVLTKMKEIAEAYLGHPVTNAVITVPAYFNDSQRQATKDAGVIAGLNVLRIINEPTAAAIAYGLDRTGKGERNVLIFDLGGGTFDVSILTIDDGIFEVKATAGDTHLGGEDFDNRLVSHFVEEFKRKHKKDISQNKRAVRRLRTACERAKRTLSSSTQASLEIDSLFEGIDFYTSITRARFEELCSDLFRGTLEPVEKALRDAKMDKAQIHDLVLVGGSTRIPKVQKLLQDFFNGRDLNKSINPDEAVAYGAAVQAAILMGDKSENVQDLLLLDVAPLSLGLETAGGVMTALIKRNSTIPTKQTQTFTTYSDNQPGVLIQVYEGERAMTRDNNLLGRFELSGIPPAPRGVPQIEVTFDIDANGILNVTATDKSTGKANKITITNDKGRLSKEEIERMVQEAERYKAEDEVQRDRVAAKNALESYAFNMKSAVEDEGLKGKLSEADKKKVLDKCQEVISWLDSNTLADKEEFVHKREELERVCSPIISGLYQGAGAPGAGGFGAQAPKGASGSGPTIEEVD

SEQ ID NO: 67 - DNA, 1927 bp, Mus musculus
  source 1..1927: mol_type = other DNA
atggccaagaacacggcgatcggcatcgacctgggcaccacctactcgtgcgtgggcgtgttccagcacggcaaggtggagatcatcgccaacgaccagggcaaccgcacgacccccagctacgtggccttcaccgacaccgagcgcctcatcggagacgccgccaagaaccaggtggcgctgaacccgcagaacaccgtgttcgacgcgaagcggctgatcggccgcaagttcggcgatgcggtggtgcagtccgacatgaagcactggcccttccaggtggtgaacgacggcgacaagcccaaggtgcaggtgaactacaagggcgagagccggtcgttcttcccggaggagatctcgtccatggtgctgacgaagatgaaggagatcgctgaggcgtacctgggccacccggtgaccaacgcggtgatcacggtgcccgcctacttcaacgactctcagcggcaggccaccaaggacgcgggcgtgatcgccggtctaaacgtgctgcggatcatcaacgagcccacggcggccgccatcgcctacgggctggaccggaccggcaagggcgagcgcaacgtgctcatcttcgacctggggggcggcacgttcgacgtgtccatcctgacgatcgacgacggcatcttcgaggtgaaggccacggcgggcgacacgcacctgggaggggaggacttcgacaaccggctggtgagccacttcgtggaggagttcaagaggaagcacaagaaggacatcagccagaacaagcgcgcggtgcggcggctgcgcactgcgtgtgagagggccaagaggacgctgtcgtccagcacccaggccagcctggagatcgactctctgttcgagggcatcgacttctacacatccatcacgcgggcgcggttcgaagagctgtgctcagacctgttccgcggcacgctggagcccgtggagaaggccctgcgcgacgccaagatggacaaggcgcagatccacgacctggtgctggtgggcggctcgacgcgcatccccaaggtgcagaagctgctgcaggacttcttcaacgggcgcgacctgaacaagagcatcaacccggacgaggcggtggcctacggggcggcggtgcaggcggccatcctgatgggggacaagtcggagaacgtgcaggacctgctgctgctggacgtggcgccgctgtcgctgggcctggagactgcgggcggcgtgatgacggcgctcatcaagcgcaactccaccatccccaccaagcagacgcagaccttcaccacctactcggacaaccagcccggggtgctgatccaggtgtacgagggcgagagggccatgacgcgcgacaacaacctgctggggcgcttcgaactgagcggcatcccgccggcgcccaggggcgtgccacagatcgaggtgaccttcgacatcgacgccaacggcatcctgaacgtcacggccaccgacaagagcaccggcaaggccaacaagatcaccatcaccaacgacaagggccgcctgagcaaggaggagatcgagcgcatggtgcaggaggccgagcgctacaaggccgaggacgaggtgcagcgcgacagggtggccgccaagaacgcgctcgaatcctatgccttcaacatgaagagcgccgtggaggacgagggtctcaagggcaagctcagcgaggctgacaagaagaaggtgctggacaagtgccaggaggtcatctcctggctggactccaacacgctggccgacaaggaggagttcgtgcacaagcgggaggagctggagcgggtgtgcagccccatcatcagtgggctgtaccagggtgcgggtgctcctggggctgggggcttcggggcccaggcgcccaagggagcctctggctcaggacccaccatcgaggaggtggattaga

SEQ ID NO: 68 - protein, 641 aa, Macaca mulatta; identical to SEQ ID NO: 64

SEQ ID NO: 69 - protein, 641 aa, Rattus norvegicus
MAKKTAIGIDLGTTYSCVGVFQHGKVEIIANDQGNRTTPSYVAFTDTERLIGDAAKNQVALNPQNTVFDAKRLIGRKFGDPVVQSDMKHWPFQVVNDGDKPKVQVNYKGENRSFYPEEISSMVLTKMKEIAEAYLGHPVTNAVITVPAYFNDSQRQATKDAGVIAGLNVLRIINEPTAAAIAYGLDRTGKGERNVLIFDLGGGTFDVSILTIDDGIFEVKATAGDTHLGGEDFDNRLVSHFVEEFKRKHKKDISQNKRAVRRLRTACERAKRTLSSSTQASLEIDSLFEGIDFYTSITRARFEELCSDLFRGTLEPVEKALRDAKLDKAQIHDLVLVGGSTRIPKVQKLLQDFFNGRDLNKSINPDEAVAYGAAVQAAILMGDKSENVQDLLLLDVAPLSLGLETAGGVMTALIKRNSTIPTKQTQTFTTYSDNQPGVLIQVYEGERAMTRDNNLLGRFELSGIPPAPRGVPQIEVTFDIDANGILNVTATDKSTGKANKITITNDKGRLSKEEIERMVQEAERYKAEDEVQRERVAAKNALESYAFNMKSAVEDEGLKGKISEADKKKVLDKCQEVISWLDSNTLAEKEEFVHKREELERVCNPIISGLYQGAGAPGAGGFGAQAPKGGSGSGPTIEEVD

SEQ ID NO: 70 - protein, 641 aa, Bos taurus
MAKNMAIGIDLGTTYSCVGVFQHGKVEIIANDQGNRTTPSYVAFTDTERLIGDAAKNQVALNPQNTVFDAKRLIGRKFGDPVVQSDMKHWPFRVINDGDKPKVQVSYKGETKAFYPEEISSMVLTKMKEIAEAYLGHPVTNAVITVPAYFNDSQRQATKDAGVIAGLNVLRIINEPTAAAIAYGLDRTGKGERNVLIFDLGGGTFDVSILTIDDGIFEVKATAGDTHLGGEDFDNRLVNHFVEEFKRKHKKDISQNKRAVRRLRTACERAKRTLSSSTQASLEIDSLFEGIDFYTSITRARFEELCSDLFRSTLEPVEKALRDAKLDKAQIHDLVLVGGSTRIPKVQKLLQDFFNGRDLNKSINPDEAVAYGAAVQAAILMGDKSENVQDLLLLDVAPLSLGLETAGGVMTALIKRNSTIPTKQTQIFTTYSDNQPGVLIQVYEGERAMTRDNNLLGRFELSGIPPAPRGVPQIEVTFDIDANGILNVTATDKSTGKANKITITNDKGRLSKEEIERMVQEAEKYKAEDEVQRERVSAKNALESYAFNMKSAVEDEGLKGKISEADKKKVLDKCQEVISWLDANTLAEKDEFEHKRKELEQVCNPIISRLYQGAGGPGAGGFGAQGPKGGSGSGPTIEEVD

SEQ ID NO: 71 - DNA, 2400 bp, Homo sapiens
  source 1..2400: mol_type = other DNA
aacggctagcctgaggagctgctgcgacagtccactacctttttcgagagtgactcccgttgtcccaaggcttcccagagcgaacctgtgcggctgcaggcaccggcgcgtcgagtttccggcgtccggaaggaccgagctcttctcgcggatccagtgttccgtttccagcccccaatctcagagcggagccgacagagagcagggaaccggcatggccaaagccgcggcgatcggcatcgacctgggcaccacctactcctgcgtgggggtgttccaacacggcaaggtggagatcatcgccaacgaccagggcaaccgcaccacccccagctacgtggccttcacggacaccgagcggctcatcggggatgcggccaagaaccaggtggcgctgaacccgcagaacaccgtgtttgacgcgaagcggctgattggccgcaagttcggcgacccggtggtgcagtcggacatgaagcactggcctttccaggtgatcaacgacggagacaagcccaaggtgcaggtgagctacaagggggagaccaaggcattctaccccgaggagatctcgtccatggtgctgaccaagatgaaggagatcgccgaggcgtacctgggctacccggtgaccaacgcggtgatcaccgtgccggcctacttcaacgactcgcagcgccaggccaccaaggatgcgggtgtgatcgcggggctcaacgtgctgcggatcatcaacgagcccacggccgccgccatcgcctacggcctggacagaacgggcaagggggagcgcaacgtgctcatctttgacctgggcgggggcaccttcgacgtgtccatcctgacgatcgacgacggcatcttcgaggtgaaggccacggccggggacacccacctgggtggggaggactttgacaacaggctggtgaaccacttcgtggaggagttcaagagaaaacacaagaaggacatcagccagaacaagcgagccgtgaggcggctgcgcaccgcctgcgagagggccaagaggaccctgtcgtccagcacccaggccagcctggagatcgactccctgtttgagggcatcgacttctacacgtccatcaccagggcgaggttcgaggagctgtgctccgacctgttccgaagcaccctggagcccgtggagaaggctctgcgcgacgccaagctggacaaggcccagattcacgacctggtcctggtcgggggctccacccgcatccccaaggtgcagaagctgctgcaggacttcttcaacgggcgcgacctgaacaagagcatcaaccccgacgaggctgtggcctacggggcggcggtgcaggcggccatcctgatgggggacaagtccgagaacgtgcaggacctgctgctgctggacgtggctcccctgtcgctggggctggagacggccggaggcgtgatgactgccctgatcaagcgcaactccaccatccccaccaagcagacgcagatcttcaccacctactccgacaaccaacccggggtgctgatccaggtgtacgagggcgagagggccatgacgaaagacaacaatctgttggggcgcttcgagctgagcggcatccctccggcccccaggggcgtgccccagatcgaggtgaccttcgacatcgatgccaacggcatcctgaacgtcacggccacggacaagagcaccggcaaggccaacaagatcaccatcaccaacgacaagggccgcctgagcaaggaggagatcgagcgcatggtgcaggaggcggagaagtacaaagcggaggacgaggtgcagcgcgagagggtgtcagccaagaacgccctggagtcctacgccttcaacatgaagagcgccgtggaggatgaggggctcaagggcaagatcagcgaggcggacaagaagaaggtgctggacaagtgtcaagaggtcatctcgtggctggacgccaacaccttggccgagaaggacgagtttgagcacaagaggaaggagctggagcaggtgtgtaaccccatcatcagcggactgtaccagggtgccggtggtcccgggcctgggggcttcggggctcagggtcccaagggagggtctgggtcaggccccaccattgaggaggtagattaggggcctttccaagattgctgtttttgttttggagcttcaagactttgcatttcctagtatttctgtttgtcagttctcaatttcctgtgtttgcaatgttgaaattttttggtgaagtactgaacttgctttttttccggtttctacatgcagagatgaatttatactgccatcttacgactatttcttctttttaatacacttaactcaggccattttttaagttggttacttcaaagtaaataaactttaaaattcaa

SEQ ID NO: 72 - protein, 412 aa, Homo sapiens
MTDRQTDTAPSPSYHLLPGRRRTVDAAASRGQGPEPAPGGGVEGVGARGVALKLFVQLLGCSRFGGAVVRAGEAEPSGAARSASSGREEPQPEEGEEEEEKEEERGPQWRLGARKPGSWTGEAAVCADSAPAARAPQALARASGRGGRVARRGAEESGPPHSPSRRGSASRAGPGRASETMNFLLSWVHWSLALLLYLHHAKWSQAAPMAEGGGQNHHEVVKFMDVYQRSYCHPIETLVDIFQEYPDEIEYIFKPSCVPLMRCGGCCNDEGLECVPTEESNITMQIMRIKPHQGQHIGEMSFLQHNKCECRPKKDRARQEKKSVRGKGKGQKRKRKKSRYKSWSVYVGARCCLMPWSLPGPHPCGPCSERRKHLFVQDPQTCKCSCKNTDSRCKARQLELNERTCRCDKPRR

SEQ ID NO: 73 - DNA, 1239 bp, Homo sapiens
  source 1..1239: mol_type = other DNA
ctgacggacagacagacagacaccgcccccagccccagctaccacctcctccccggccggcggcggacagtggacgcggcggcgagccgcgggcaggggccggagcccgcgcccggaggcggggtggagggggtcggggctcgcggcgtcgcactgaaacttttcgtccaacttctgggctgttctcgcttcggaggagccgtggtccgcgcgggggaagccgagccgagcggagccgcgagaagtgctagctcgggccgggaggagccgcagccggaggagggggaggaggaagaagagaaggaagaggagagggggccgcagtggcgactcggcgctcggaagccgggctcatggacgggtgaggcggcggtgtgcgcagacagtgctccagccgcgcgcgctccccaggccctggcccgggcctcgggccggggaggaagagtagctcgccgaggcgccgaggagagcgggccgccccacagcccgagccggagagggagcgcgagccgcgccggccccggtcgggcctccgaaaccatgaactttctgctgtcttgggtgcattggagccttgccttgctgctctacctccaccatgccaagtggtcccaggctgcacccatggcagaaggaggagggcagaatcatcacgaagtggtgaagttcatggatgtctatcagcgcagctactgccatccaatcgagaccctggtggacatcttccaggagtaccctgatgagatcgagtacatcttcaagccatcctgtgtgcccctgatgcgatgcgggggctgctgcaatgacgagggcctggagtgtgtgcccactgaggagtccaacatcaccatgcagattatgcggatcaaacctcaccaaggccagcacataggagagatgagcttcctacagcacaacaaatgtgaatgcagaccaaagaaagatagagcaagacaagaaaaaaaatcagttcgaggaaagggaaaggggcaaaaacgaaagcgcaagaaatcccggtataagtcctggagcgtgtacgttggtgcccgctgctgtctaatgccctggagcctccctggcccccatccctgtgggccttgctcagagcggagaaagcatttgtttgtacaagatccgcagacgtgtaaatgttcctgcaaaaacacagactcgcgttgcaaggcgaggcagcttgagttaaacgaacgtacttgcagatgtgacaagccgaggcggtga

SEQ ID NO: 74 - protein, 389 aa, Homo sapiens
MTDRQTDTAPSPSYHLLPGRRRTVDAAASRGQGPEPAPGGGVEGVGARGVALKLFVQLLGCSRFGGAVVRAGEAEPSGAARSASSGREEPQPEEGEEEEEKEEERGPQWRLGARKPGSWTGEAAVCADSAPAARAPQALARASGRGGRVARRGAEESGPPHSPSRRGSASRAGPGRASETMNFLLSWVHWSLALLLYLHHAKWSQAAPMAEGGGQNHHEVVKFMDVYQRSYCHPIETLVDIFQEYPDEIEYIFKPSCVPLMRCGGCCNDEGLECVPTEESNITMQIMRIKPHQGQHIGEMSFLQHNKCECRPKKDRARQEKKSVRGKGKGQKRKRKKSRPCGPCSERRKHLFVQDPQTCKCSCKNTDSRCKARQLELNERTCRCDKPRR

SEQ ID NO: 75 - DNA, 1170 bp, Homo sapiens
  source 1..1170: mol_type = other DNA
ctgacggacagacagacagacaccgcccccagccccagctaccacctcctccccggccggcggcggacagtggacgcggcggcgagccgcgggcaggggccggagcccgcgcccggaggcggggtggagggggtcggggctcgcggcgtcgcactgaaacttttcgtccaacttctgggctgttctcgcttcggaggagccgtggtccgcgcgggggaagccgagccgagcggagccgcgagaagtgctagctcgggccgggaggagccgcagccggaggagggggaggaggaagaagagaaggaagaggagagggggccgcagtggcgactcggcgctcggaagccgggctcatggacgggtgaggcggcggtgtgcgcagacagtgctccagccgcgcgcgctccccaggccctggcccgggcctcgggccggggaggaagagtagctcgccgaggcgccgaggagagcgggccgccccacagcccgagccggagagggagcgcgagccgcgccggccccggtcgggcctccgaaaccatgaactttctgctgtcttgggtgcattggagccttgccttgctgctctacctccaccatgccaagtggtcccaggctgcacccatggcagaaggaggagggcagaatcatcacgaagtggtgaagttcatggatgtctatcagcgcagctactgccatccaatcgagaccctggtggacatcttccaggagtaccctgatgagatcgagtacatcttcaagccatcctgtgtgcccctgatgcgatgcgggggctgctgcaatgacgagggcctggagtgtgtgcccactgaggagtccaacatcaccatgcagattatgcggatcaaacctcaccaaggccagcacataggagagatgagcttcctacagcacaacaaatgtgaatgcagaccaaagaaagatagagcaagacaagaaaaaaaatcagttcgaggaaagggaaaggggcaaaaacgaaagcgcaagaaatcccgtccctgtgggccttgctcagagcggagaaagcatttgtttgtacaagatccgcagacgtgtaaatgttcctgcaaaaacacagactcgcgttgcaaggcgaggcagcttgagttaaacgaacgtacttgcagatgtgacaagccgaggcggtga

SEQ ID NO: 76 - protein, 206 aa, Homo sapiens
APMAEGGGQNHHEVVKFMDVYQRSYCHPIETLVDIFQEYPDEIEYIFKPSCVPLMRCGGCCNDEGLECVPTEESNITMQIMRIKPHQGQHIGEMSFLQHNKCECRPKKDRARQEKKSVRGKGKGQKRKRKKSRYKSWSVYVGARCCLMPWSLPGPHPCGPCSERRKHLFVQDPQTCKCSCKNTDSRCKARQLELNERTCRCDKPRR

SEQ ID NO: 77 - protein, 186 aa, Homo sapiens
PVSQPDAPGHQRKVVSWIDVYTRATCQPREVVVPLTVELMGTVAKQLVPSCVTVQRCGGCCPDDGLECVPTGQHQVRMQILMIRYPSSQLGEMSLEEHSQCECRPKKKDSAVKPDRAATPHHRPQPRSVPGWDSAPGAPSPADITHPTPAPGPSAHAAPSTTSALTPGPAAAAADAAASSVAKGGA

SEQ ID NO: 78 - protein, 116 aa, Homo sapiens
AHYNTEILKSIDNEWRKTQCMPREVCIDVGKEFGVATNTFFKPPCVSVYRCGGCCNSEGLQCMNTSTSYLSKTLFEITVPLSQGPKPVTISFANHTSCRCMSKLDVYRQVHSIIRR

SEQ ID NO: 79 - protein, 117 aa, Homo sapiens
FAATFYDIETLKVIDEEWQRTQCSPRETCVEVASELGKSTNTFFKPPCVNVFRCGGCCNEESLICMNTSTSYISKQLFEISVPLTSVPELVPVKVANHTGCKCLPTAPRHPYSIIRR

SEQ ID NO: 80 - DNA, 23272 bp, Homo sapiens
  source 1..23272: mol_type = other DNA
cgcctgtaatcccagcactctgggaggcagaggtgggccgatcacttgaggtcaggagttcgagaccagcctgggcaacatggtgaaacaccatctctactaaaaacacaaaaattagccaggtgtggtggcaggcacctgcagtcccagctactccggaggctgaggcaggagaattgctcgaacctgggaggcaggggttgcagtgagccgacatggcgccactgcactccagtctgggcgacagagtgagaccctatctcaaaaaaaaaaaaaaaaaaaaaagacccaactcaagtatcatctccaggaagccttcccctactcccagcaattaaatgctcctcagagaattcccatttttggtttactctttggtttacctccagacaggaagcccccactgacactgttgtagtcccagggtgcaacacaaagcagagatcacaagctgagtttaataattgcttgtggaatacatgtcccaagccacctcctgcaggaagcccttccagatgcccattctagccagtctggctctttgcttccataccttcacaacacttgtgcctcccccagggcctctttctcatcttgctttctggggcagctgtgtgcacatttgtctgtgtgcagcaactctctaaggcagggatttttactcctatttttgatgaggggagctgtggctcagagaggttgaataacctaaggccacacagtgagtggcagagccaggaatgtgacttgggtccatttgaatccaaagtccctgtactttccactgccctacctagatgtccctgtacctcctataaaatcagcatggagcctggtgcctggtagtccctacaaatattcacaaattggagcttagctcagctctcaggcaaggcccaggtcaaaagggcagatacagctttgggaccttagttgccaccacatgccataccttcttcccagcagaaggactccctccaagacagggtaggggtggaggatgtgaacaggggcagaaatgggcatgttttggggtcagacttggaggaatagcagagattggagtgtcagaaggtgagcatgcctgggggtgttggggagatgcaattcatcagggacagcttagtgtcaggggattagactggggcccatgaaggagaggcagaggctgatgggcctaggggtggtgtgggtaggtgagcttccccagacagtgactctgccctgccctctctccagctaggtcctcttccccattccttccccctttcctgactggatcctcttgggagagttaccctccttggcttcctctgctccaatctttttatcagttggccatcattacttatcattacctcaagtcaaacctccagatccacatggggctaggacattggcactggaccaaagaggccctttcctttgctttctctttgtctttttaatgctttgttgcaaagacctaggcggggagagagagagagagagagagacagagattgacccacagtcagggtcagggaattgaggggaaccaacccaattctctctccttcaattcaccaggtttgtatcctgcccttcctgcagatcagtgtcctgctagtcacctgggggtcaggggatggagtgaaggacaagacctccttccattgcagtgaagccacttggagaaatgtgtggaaaacagcaagacccagtgactctctcctcaccttctttccaatctcaggagagattttgtcccttcatccaccggcttctagattaaccacccacacccacacaggcgagagtttccctgaatattggaggtgacaggacatcaggacaaagtacaactattgtgccttggcccaatcactactttctttgtctggggccgccgctggctcctggctgcctttcgcacttttctccacccccacccctttctccccttccccctcacctggaacaccttccccttcctccttggctccttctgaactgccttcagagccacagactgtggggagtggccactgcgctcccaaggtgaggccctccaagcggggccgagtttgcccctcaactgggagccagcatgacctctgtgtgggctgctctctgcttcactgccccttcccccaatctgctaggtgaccctgggcccctttgtgccctctctgggccttcggaggattctttggggagacagtctgctctgacgccccttcccctgcagcaagcagcctggggagggaggtgaggataagtgaagtcaagttgttcagggggctaagcccatggaagggaagatgccacagagatacatgtggtcttgtgattgttgttttgtgctttttccccttttttgaaagctcaggtgactaggtgacttgagcttttaatttggtgacaatgtgggcactggctgagtccttaagagtacattgttgtaaatgccggtgacaacacactggggcatgggatccagagttaacccctccaggtcacagccaggttatatctccacaatgaaggggggaggtgggccatactttctcgccctaatgaaggtagctcaaaaacccctaggccaggttgtaatcctagccttatataaaaggaattctgtgccctcactcccctggatccctgggcaaagccccagagggaaacacaaacaggttgttgtaacacaccttgctgggtaccaccatggaggacagttggcttatgggggtggggggtgcctggggccacggagtgactggtgatggctatccctccttggaacccctccagcctcctcttagcttcagatttgtttatttgttttttactaagacctgctctttcaggtctgttggctcttttaggggctgaagaaggccgagttgagaagggatgcaagggagggggccagaatgagcccttagggctcagagcctccatcctgccccaagatgtctacagcttgtgctcctggggtgctagaggcgcacaaggaggaaagttagtggcttcccttccatatcccgttcatcagcctagagcatggagcccaggtgaggaggcctgcctgggagggggccctgagccaggaaataaacatttactaactgtacaaagaccttgtccctgctgctggggagcctgccaagtggtggagacaggactagtgcacgaatgatggaaagggagggttggggtgggtgggagccagcccttttcctcataagggccttaggacaccataccgatggaactgggggtactggggaggtaacctagcacctccaccaaaccacagcaacatgtgctgaggatggggctgactaggtaagctccctggagcgttttggttaaattgagggaaattgctgcattcccattctcagtccatgcctccacagaggctatgccagctgtaggccagaccctggcaagatctgggtggataatcagactgactggtcccactcttcccacaggcctcagagccccaactttgttccctggggcagcctggaaatagccaggtcagaaaccagctaggaatttttccaagctgcttcctatatgcaagaatgggatggggcctttgggagcacttagggaagatgtggagagttggaggaaaagggggcttggaggtaagggaggggactgggggaaggataggggagaagctgtgagcctggagaagtagccaagggatcctgagggaatgggggagctgagacgaaacccccatttctattcagaagatgagctatgagtctgggcttgggctgatagaagccttggcccctggcctggtgggagctctgggcagctggcctacagacgttccttagtgctggcgggtaggtttgaatcatcacgcaggccctggcctccacccgcccccaccagccccctggcctcagttccctggcaacatctggggttgggggggcagcaggaacaagggcctctgtctgcccagctgcctccccctttgggttttgccagactccacagtgcatacgtgggctccaacaggtcctcttccctcccagtcactgactaaccccggaaccacacagcttcccgttctcagctccacaaacttggtgccaaattcttctcccctgggaagcatccctggacacttcccaaaggaccccagtcactccagcctgttggctgccgctcactttgatgtctgcaggccagatgagggctccagatggcacattgtcagagggacacactgtggcccctgtgcccagccctgggctctctgtacatgaagcaactccagtcccaaatatgtagctgtttgggaggtcagaaatagggggtccaggagcaaactccccccaccccctttccaaagcccattccctctttagccagagccggggtgtgcagacggcagtcactagggggcgctcggccaccacagggaagctgggtgaatggagcgagcagcgtcttcgagagtgaggacgtgtgtgtctgtgtgggtgagtgagtgtgtgcgtgtggggttgagggcgttggagcggggagaaggccaggggtcactccaggattccaatagatctgtgtgtccctctccccacccgtccctgtccggctctccgccttcccctgcccccttcaatattcctagcaaagagggaacggctctcaggccctgtccgcacgtaacctcactttcctgctccctcctcgccaatgccccgcgggcgcgtgtctctggacagagtttccgggggcggatgggtaattttcaggctgtgaaccttggtgggggtcgagcttccccttcattgcggcgggctgcgggccaggcttcactgagcgtccgcagagcccgggcccgagccgcgtgtggaagggctgaggctcgcctgtccccgccccccggggcgggccgggggcggggtcccggcggggcggagccatgcgccccccccttttttttttaaaagtcggctggtagcggggaggatcgcggaggcttggggcagccgggtagctcggaggtcgtggcgctgggggctagcaccagcgctctgtcgggaggcgcagcggttaggtggaccggtcagcggactcaccggccagggcgctcggtgctggaatttgatattcattgatccgggttttatccctcttcttttttcttaaacatttttttttaaaactgtattgtttctcgttttaatttatttttgcttgccattccccacttgaatcgggccgacggcttggggagattgctctacttccccaaatcactgtggattttggaaaccagcagaaagaggaaagaggtagcaagagctccagagagaagtcgaggaagagagagacggggtcagagagagcgcgcgggcgtgcgagcagcgaaagcgacaggggcaaagtgagtgacctgcttttgggggtgaccgccggagcgcggcgtgagccctcccccttgggatcccgcagctgaccagtcgcgctgacggacagacagacagacaccgcccccagccccagctaccacctcctccccggccggcggcggacagtggacgcggcggcgagccgcgggcaggggccggagcccgcgcccggaggcggggtggagggggtcggggctcgcggcgtcgcactgaaacttttcgtccaacttctgggctgttctcgcttcggaggagccgtggtccgcgcgggggaagccgagccgagcggagccgcgagaagtgctagctcgggccgggaggagccgcagccggaggagggggaggaggaagaagagaaggaagaggagagggggccgcagtggcgactcggcgctcggaagccgggctcatggacgggtgaggcggcggtgtgcgcagacagtgctccagccgcgcgcgctccccaggccctggcccgggcctcgggccggggaggaagagtagctcgccgaggcgccgaggagagcgggccgccccacagcccgagccggagagggagcgcgagccgcgccggccccggtcgggcctccgaaaccatgaactttctgctgtcttgggtgcattggagccttgccttgctgctctacctccaccatgccaaggtaagcggtcgtgccctgctggcgccgcgggccgctgcgagcgcctctcccggctggggacgtgcgtgcgagcgcgcgcgtgggggctccgtgccccacgcgggtccatgggcaccaggcgtgcggcgtccccctctgtcgtcttaggtgcagggggagggggcgcgcgcgctaggtgggagggtacccggagagaggctcaccgcccacgcgggccctgcccacccaccggagtcaccgcacgtacgatctgggccgaccagccgagggcgggagccggaggaggaggccgagggggctgggcttgcgttgccgctgccggctgaagtttgctcccggccgctggtcccggacgaactggaagtctgagcagcgggggcgggagccagagaccagtgggcagggggtgctcggaccttggaccgcgggagggcagagagcgtggagggggcagggcgcaggagggagagggggcttgctgtcactgccactcggtctcttcagccctcgccgcgagtttgggaaaagttttggggtggattgctgcggggaccccccctccctgctgggccacctgcgccgcgccaaccccgcccgtccccgctcgcgtcccgctcggtgcccgccctcccccgcccggccgggtgcgcgcggcgcggagccgattacatcagcccgggcctggccggccgcgtgttcccggagcctcggctgcccgaatggggagcccagagtggcgagcggcacccctccccccgccagccctccgcgggaaggtgacctctcgaggtagccccagcccggggatccagagaaccatccctaccccttcctactgtctccagaccctacctctgcccagtgctaggaggaatttcctgacgccccttctcttcacccatttcctttttagcctggagagaagcccctgtcaccccgcttattttcatttctctctgcggagaagatccatctaacccctttctggccccagagtccagggaaaggatgatcactgtcagaagtcgtggcgcgggagcccactgggcgctttgtcacattccaccgaaagtcccgacttggtgacagtgtgcttcccttccctcgccaacagttccgagtgagctgtgctttagctctcgtgggggtgggtcaagggaggatttgaagagtcattgccccactttacccttttggagaaatggcttgaaatttgctgtgacacgggcagcatgggaatagtccttcctgaaccctggaaaggagctcctgccagccttgcacacactttgtcctggtgaaaggcagccctggagcaggtgtttttttggaactccaaacctgcccacccaacttgcttctgaaagggactctaaagggtccctttccgctcctctctgacgccttccctcagccagaattcccttggagaggaggcaagaggaaagccatggacaggggtcgctgctaacaccgcaagttcctcagaccctggcacaaaggccttggctacaggcctccaagtagggaggagggggaggagtggctgcctggccacagtgtgaccttcagaggcccccagagaaggacacctggcccctgcctgcctagaaccgcccctcctgtgctccctggccttggaaggggtatgaaatttccgtcccctttcctccttggggcccaggaggagtggagggtcccgggagaatattgtcagggggaaggcagggggtgtcatgggaatgggtgagggggctgaggtgcagaatccagggggtccctgcaggagccgcagtggtaagctgtccagctggaagcctggtaactgttgttttctcttgagaggggcttcctgtgaccttggctgtctctgggagcagggctggggtacctgagtggggtgcatttggggtgtgtgggaaggagagggaaagaaagatggacagtgggactctcccctagcagggtctggtgttccgtaggctagagtgcccctctgctctgcgagtgctgggcgggaggggagttggtgagagctggagacccccaggaagggctggcagaagcctttccttttgggtgctgtcaggtccgcatgtcttggcgtgttgaccttcacagcttctggcgaggggaggaatgatctgatgcgggtggggagggttagaggaggcctcaggcctaaggtggtgcagggggccccctaggggctgggcagtgccaaggcataaaagccttccctggtccctggtggcatttgaaggtgcccaggtgagaggggcttggcacctcctcaccctgggagggagaagaaaccagggaacaggtaggagtgggagacaggtgaggctttggaaatctattgaggctctggagagatttgtgtagagaggaaaatgtggttctcccccagggtctcctcctgggtttttaccctctaagcaacctgtgggcatgctgggttattcctaaggactagaagagcttggatgggggagggtggttggtgcccttcggtcctcggcacccccctccgtctccaacaccagctcaccctggtatttgtcatgtcagcaggagaaggtcaccatgttgtttttctcgcccctagtccttccttcctgccccagtccaaatttgtcctcctatttgaccttaatacttaccatggctttggaccagggaactagggggatagtgagagcagggagagggaagtgtggggaaggtacaggggacctcgacagtgaagcattctggggttttcctcctgcatttcgagctccccagcccccaacatctggttagtctttaacttcctcgggttcataaccatagcagtccaggagtggtgggcatattctgtgcccgtggggacccccggttgtgtcctgttcgactcagaagacttggagaagccagaggctgttggtgggagggaagtgaggagggaggaggggctgggtggctgggcctgtgcaccccagcccctgcccatgcccatgccttgctctctttctgtcctcagtggtcccaggctgcacccatggcagaaggaggagggcagaatcatcacgaaggtgagtccccctggctgttggatggggttccctgtcctctcaggggatgggtggatggcctaattcctttttcttcagaactgtggggaggaaggggaaggggcacaggaatataaggatcaagaaagaaagagctgggcaccacgaggttcaccctcagtttcgtgaggactctccgctgttcaggtctctgctagaagtaggacttgttgcctttttcttctgctctttccagtaaaattttatttggagaaggagtcgtgcgcacagagcaggaagacagtgttcagggatcctaggtgttgggggaagtgtcccttgtttcccctagctcccaggggagagtggacatttagtgtcatttcctatatagacatgtcccatttgtgggaactgtgacccttcctgtgtgagctggaggcacagagggctcagcctaatgggatctctcctcccttccctggtttgcattcctttgggggtggagaaaaccccatttgactatgttcgggtgctgtgaacttccctcccaggccagcagagggctggctgtagctcccaggcgccccgcccccctgcccaaccccgagtccgcctgccttttgttccgttgtggtttggatcctcccatttctctggggacaccctggctctccccaccactgactgtggcctgtgctctccacctctggggagggaaggccctggggtcttccttcccgcgagtttccctgacctaaatctggcgtggctgggtagtggccagcagtggtgatgcccagcctgttctgcctcctccttccccaccccaggagccctttccttggcctaggacctggcttctcagccactgaccggccccctgcttccagtgcgccacttaccccttccagcttcccagtggtctctggtctgggagaggcaggacaaaggtctttgtttgctggagaaaaggttgtctgcgataaataaggaaaaccacgaaagcctggttgttggagtgtacgtgtgtgctcccccaggcagtggaggccagccctccttggaggggcggctgcctgatgaaggatgcgggtgaggttccccgcctccacctcccatgggacttggggattcattccaaggggaagctttttgggggaattcctaccccaggtctttttaccctcagttaccaaccccttgcccaggccagaccttcctgctatcccctcctgggccacaagcctggccctcctctgtcccaattgtgatgaaggggcagttcaaaacttcttgattagtcatcttctcccctatcgacttggctttaaaaaatgaccttttcagacttctagtctcgttcactctttttgatgatgctttgccgtaacccttcgtgggtagagaaggattctgtgcccattggtggtctggataaaagaaatagagacctcacaggaagcagtggactggcctgtttccccactgttctttctgttttcacacctgtggccttctccccaccttcttcccaatcaacctattgtgtacatagcccccctcattgtcctttattcttctggaaagcagaccttggagggaggagtgagggggaggctcagctgtggtctctggggggtgggggttgggagctggggtggaagtccacgaagcatacacttaagatgctttggtgaagttctaaacttcatattacccaggctgaaaaaagagcacttgttcctagggctggaaatggaagccaaaacaccacctttttcagcctgtttcagcatctttagagatcagcccaacccacttacacagttgagcagagttggaggcctagagaggggagggactggcccaaggtcataccaactcatggccagagcctgggcctcctcactggccaggtgttatttcttccctctgggtagggaacctatttcagggacaggattgctatgtggtagtggtggtggggtgcgataggcgtggcaggctgggccacaatttggagtagtcatgccagagtcctgcatttatttattctcaagggccccgcctctgtggcccagaattaccccttcatgctccagtgcaccccaggcttcgtggccagcctgggaaactgtctctaccctggtctcccttcagatcagcttctagaaatgtttcgtggctacagtggcagcactgttttttccatgatgcaagcagtttgccctcttgggcggggttatcagtggctggcagggctggcacagcgtgtccgcccactgccacctgtgggttccaggagggcccagcccctgtgctgatgcccaccaccttctcagctcatgtctggggaagaggactggcagggggaaaggtgcctcctcctgaaaggtgcctcctctgtttttgcctaatataggcttgggaacactttgatgtcagctaattctgactcctttacttactagctgtgcggccttggggcaacttacttagcctctttgagcctcctgttccccatctgtaaaatggaatctcaatagtgtctaatagtaccatgtggagaaacttgtgtgaaatgatagctgtggactactgtacacagtactcaggatgtagtaagtgctcaataaacagctgttggtatggttgacgttatggtagtggttgtggggaggacgtaggaaactggagactagcttggcaaagctggctcttcctccttttagggaaagcttagagcatccccatggggtatacccatactcagactgtcctctggcatcgaggttggcccaggattcagttcagctgtcacagtgaggtggcgggatcagatgtggcaggccatgtcccttggaacttgagtacatcgtgtgatctctggaatgaaaacaggccttcaccagtgttgatggtggaaagcttagggaagtgcttcaaacacagtaggagggacttacgttagattttggaaggacttgcctgattcggaagctccaaagagtggcattacagagctgggtggagagaggggctagccatcttttgtgtcgcccaccgggctcatgtgtcatcgcctctcatgcagtggtgaagttcatggatgtctatcagcgcagctactgccatccaatcgagaccctggtggacatcttccaggagtaccctgatgagatcgagtacatcttcaagccatcctgtgtgcccctgatgcgatgcgggggctgctgcaatgacgagggcctggagtgtgtgcccactgaggagtccaacatcaccatgcaggtgggcatctttgggaagtggggcaagggggggatagggaggggggtaacactttgggaacaggtggtcccaggtcgtttcctggctagatttgccttgtctggctcctgcccctgagttgcacaggggaggtatggtggggtcttgccttctgtggagaagatgcttcattcccagcccaggttcccagcaagccccaaccatctccttctccctgatggttgcccatgggctcaggaggggacagatggatgcctgtgtcaggagcccctctctccctctcttggagagagtcctgagtgcccccccttcttgggggctttgtttgggaagctggatgagcctggtccatggagagtttaaaaagtcttttggtgttacctggtaatggggcacatctcagcccagatagggtgggagggagctgtgaaacacagggagggggttgctttcgggtatctactaggagtcagggtgaagcctagagaggatgaaagaaggggaggggatggggagtggtaagaacctaggatttgaattcccagcctggccaacccttgcagccatgtcttggcctcaagtggaacaagggctccttgaggccagcagggttgggggagttggggtgggcctgagcctctttcctgctagagctcttggtcctccctgcctccaccacccatccctgctctgcagaacccctgggtgctgagtggcaggagccccagggttgtcccatctgggtatggctggctgggtcactaacctctgtgatctgcttccttcctttccagattatgcggatcaaacctcaccaaggccagcacataggagagatgagcttcctacagcacaacaaatgtgaatgcaggtgaggatgtagtcacggattcattatcagcaagtggctgcagggtgcctgatctgtgccagggttaagcatgctgtactttttggcccccgtccagcttcccgctatgtgacctttggcattttacttcaatgtgcctcagtttctacatctgtaaaatgggcacaatagtagtatacttcatagcattgttataatgattaaacaagttatatatgaaaagattaaaacagtgttgctccataataaatgctgtttttactgtgattattattgttgttatccctatcattatcatcaccatcttaacccttccctgttttgctcttttctctctccctacccattgcagaccaaagaaagatagagcaagacaagaaaagtaagtggccctgactttagcacttctccctctccatggccggttgtcttggtttggggctcttggctacctctgttgggggctcccatagcctccctgggtcagggacttggtcttgtgggggacttgtggtggcagcaacaatgggatggagccaactccaggatgatggctctagggctagtgagaaaacatagccaggagcctggcacttcctttggaagggacaatgccttctgggtctccagatcattcctgaccaggacttgctgtttcggtgtgtcagggggcactgtggacactggctcactggcttgctctaggacacccacagtggggagagggagtgggtggcagagaggccagcttttgtgtgtcagaggaaatggcctcttttggtggctgctgtgacggtgcagttggatgcgaggccggctggagggtggtttctcagtgcatgccctcctgtaggcggcaggcggcagacacacagccctcttggccagggagaaaaagttgaatgttggtcattttcagaggcttgtgagtgctccgtgttaaggggcaggtaggatggggtgggggacaaggtctggcggcagtaacccttcaagacagggtgggcggctggcatcagcaagagcttgcagggaaagagagactgagagagagcacctgtgccctgccctttcccccacaccatcttgtctgcctccagtgctgtgcggacattgaagcccccaccaggcctcaaccccttgcctcttccctcagctcccagcttccagagcgaggggatgcggaaaccttccttccaccctttggtgctttctcctaagggggacagacttgccctctctggtcccttctccccctcctttcttccctgtgacagacatcctgaggtgtgttctcttgggcttggcaggcatggagagctctggttctcttgaaggggacaggctacagcctgccccccttcctgtttccccaaatgactgctctgccatggggagagtagggggctcgcctgggctcggaagagtgtctggtgagatggtgtagcaggctttgacaggctggggagagaactccctgccaagtaccgcccaagcctctcctccccagacctccttaactcccaccccatcctgctgcctgcccagggctccaggacacccagccctgcctcccagtccaggtcgtgctgagcaggctggtgttgctcttggttccgtgccagctcccaaggtagccgcttcccccacaccgggattcccagaggttctgtcgcagttgcaaatgaaggcacaaggcctgatacacagccctccctcccactcctgctccccatccaggcaggtctctgaccttctccccaaagtctggcctaccttttatcacccccggaccttcagggtcagacttggacagggctgctgggcaaagagccttccctcaggctttgccccctgccggggactgggagccactgtgagtgtggagacctttgggtcctgtgccctccacccagtctcggcttcccaccaaagccttgtcaggggctgggtttgccatcccatggtgggcagcgtgaggagaagaaagagccatcgagtgcttgctgcccagacacgcctgtgtgcgcccgcgcatgcctccccagagaccacctgcctcctgacacttcctccgggaagcggccctgtgtggctttgctttggtcgttcccccatccctgcccaccttaccacttcttttactccccccaccgcccccgctctctctctgtctctgtttttttattttccagaaaatcagttcgaggaaagggaaaggggcaaaaacgaaagcgcaagaaatcccggtataagtcctggagcgtgtacgttggtgcccgctgctgtctaatgccctggagcctccctggcccccagtacaacctccgcctgccattccctgtaaccctgcctccctcccctggtccttccctggctctcatcctcctggcccgtgtctctctctcactctctcactccactaattggcaccaacgggtagatttggtggtggcattgctggtccagggttggggtgaatgggggtgccgacttggcctggaggattaagggaggggaccctggcttggctgggcaccgattttctctcacccactgggcactggtggcgggcccatgttggcacaggtgcctgctcacccaactggtttccattgctctaggcttctgcactcgtctggaagctgagggtggtggggagggcagacatggcccaagaagggctgtgaatgactggaggcagcttgctgaatgactccttggctgaaggaggagcttgggtgggatcagacaccatgtggcggcctcccttcatctggtggaagtgccctggctcctcacggaggtggggcctctggaggggagccccctattccggcccaacccatggcacccacagaggcctccttgcagggcagcctcttcctctgggtcggaggctgtggtgggccctgccctgggccctctggccaccagcggcctggcctggggacaccgcctccgggcttagcctcccatcacaccctactttagcccaccttggtggaagggcctggacatgagccttgcacggggagaaggtggcccctgattgccatccccagcaggtgaagagtcaaggcgtgctccgatgggggcaacagcagttgggtccctgtggcctgagactcacccttgtctcccagagacacagcattgccccttatggcagcctctccctgcactctctgcccgtctgtgcccgcctcttcctgcggcaggtgtcctagccagtgctgcctctttccgccgctctctctgtcttttgctgtagcgctcggatccttccagggcctgggggctgaccggctgggtgggggtgcagctgcggacatgttagggggtgttgcatggtgattttttttctctctctctgctgatgctctagcttagatgtctttccttttgcctttttgcagtccctgtgggccttgctcagagcggagaaagcatttgtttgtacaagatccgcagacgtgtaaatgttcctgcaaaaacacagactcgcgttgcaaggcgaggcagcttgagttaaacgaacgtacttgcaggttggttcccagagggcaagcaagtcagagaggggcatcacacagagatggggagagagagagagaaagagagtgagcgagcgagcgagcgggagagcgcctgagaggggccagctgcttgctcagtttctagctgcctgcctggtgactgctgccttctctgcttttaaggcccctgtggtgggctgcaggcactggtccagcctggcggggcctgttccgaggttgccctggttgcctgagtggtaggctggtgtggcttagtgtagtggtgtggacgcaagctgtgtgttgtgtcctgtggtccttctgctcatagtggctgttggtcctgatgttattactacctctggtagtaatgctgagaagctgaaagccgattccaggtgtggacaatgtcaacaaagcacagatgctctcgctggggccttgcctcggccctttgaagtctgcatggctgggcttctcactcactcagtgtttcttgctgggggaaggaattgagtctcccacttcagactgggcctccctgaggaaagggttgtgtctccccactcagactgaggttccctgagggtagggctgtgtctctcccctccgacctgggctccctgatagggctgtctccccgctcagactgaggctccctcaggccagggctatgtctccctcctcagactggggctctgagggcaaggggtctggctgttcgtttaggatggggcacttttgcctacacactgaaggagctgtagcatccaagaatactagatacctttaatcctccaccagtcatggtgacaaccccaagcagcccacacattttcaagtgcccccaggatgcgtggagggaggggtctgtgcccattctcctgacattagcctgtgagctccgtaagcccgggcctcgtttacgtacctttgtgagccccgggcatctgtacctctttcctttgcccatactggggaccaaggaagtgtcaagtgcatgagtgaatgtgtgactcagttcagagggtgaggtcaggagcacagggtcgggacaggtggctggcatcttttaatgccttagcttatgttctttataccaacttggcctgtgctcagagtgagggaggccctgggggtcagggtaagcgtcagtcagggaggcaagactttgtggggatttcctagacagggccaaggcacccccagctcaccccgaggctgtgttagggaagtccttggagtgtctcccctcccccagcaatgttcttgtggcttgtgtgtgctcaggggatgctgggaaccaggcctgggtagttggtgtggggtgctgtctgtcttggccctatgtgaaaccaagagggcgtatattagtgctggggtgggggctctgcctaacttcagggctggatgaggggagtctcagttccccaggggtccttgggaaagataagggacttgacattttagggtttttaggtgattattctgctgatgggggtttgtgtgaagtgacctgggagctaactgaagttactctaacctcccaatacctttacccaacccccaagctggctgtatctgggaatatcagtttccaaaattggaggcttaggactccgtttcggggctccccagaagggtagggcctgttctgcctccttctcacaatcacccaggggcaggggcatgctgagaaagttcttggaggccccctttgcttcagctggagtagtgaagccgccgaattgtctctccccatcctaagtgaagcagcatatttgaaaggaaagacaacctgttacctgggcctgcaacctccaggcagctcaagagagatgaggcctacagccacagtgggaggggacatggggaatggagatggtccctcaccttcctggggcctcctgctctacgctaccccctcgggagcctcctgtccccagggcaggcccttgccattgttggtcacccggccaagcctctctgcctcaggcgttctcccagaagatctgcccactctcttccccacaccagcccctagagactgaactgaaaaccctcctcagcagggagcctcttctgattaacttcatccagctctggtcacccatcagctcttaaaatgtcaagtggggactgttctttggtatccgttcatttgttgctttgtaaagtgttcccatgtccttgtcttgtctcaagtagattgcaagctcaggagggtagactgggagcccctgagtggagctgctgctcaggccggggctccctgagggcagggctggggctgttctcatactggggctttctgccccaggaccacaccttcctgtcctctctgctcttatggtgccggaggctgcagtgacccaggggcccccaggaatggggaggccgcctgcctcatcgccaggcctcctcacttggccctaaccccagcctttgttttccatttccctcagatgtgacaagccgaggcggtgagccgggcaggaggaaggagcctccctcagggtttcgggaaccagatctctcaccaggaaagactgatacagaacgatcgatacagaaaccacgctgccgccaccacaccatcaccatcgacagaacagtccttaatccagaaacctgaaatgaaggaagaggagactctgcgcagagcactttgggtccggagggcgagactccggcggaagcattcccgggcgggtgacccagcacggtccctcttggaattggattcgccattttatttttcttgctgctaaatcaccgagcccggaagattagagagttttatttctgggattcctgtagacacacccacccacatacatacatttatatatatatatattatatatatataaaaataaatatctctattttatatatataaaatatatatattctttttttaaattaacagtgctaatgttattggtgtcttcactggatgtatttgactgctgtggacttgagttgggaggggaatgttcccactcagatcctgacagggaagaggaggagatgagagactctggcatgatcttttttttgtcccacttggtggggccagggtcctctcccctgcccaggaatgtgcaaggccagggcatgggggcaaatatgacccagttttgggaacaccgacaaacccagccctggcgctgagcctctctaccccaggtcagacggacagaaagacagatcacaggtacagggatgaggacaccggctctgaccaggagtttggggagcttcaggacattgctgtgctttggggattccctccacatgctgcacgcgcatctcgcccccaggggcactgcctggaagattcaggagcctgggcggccttcgcttactctcacctgcttctgagttgcccaggagaccactggcagatgtcccggcgaagagaagagacacattgttggaagaagcagcccatgacagctccccttcctgggactcgccctcatcctcttcctgctccccttcctggggtgcagcctaaaaggacctatgtcctcacaccattgaaaccactagttctgtccccccaggagacctggttgtgtgtgtgtgagtggttgaccttcctccatcccctggtccttcccttcccttcccgaggcacagagagacagggcaggatccacgtgcccattgtggaggcagagaaaagagaaagtgttttatatacggtacttatttaatatccctttttaattagaaattaaaacagttaatttaattaaagagtagggttttttttcagtattcttggttaatatttaatttcaactatttatgagatgtatcttttgctctctcttgctctcttatttgtaccggtttttgtatataaaattcatgtttccaatctctctctccctgatcggtgacagtcactagcttatcttgaacagatatttaattttgctaacactcagctctgccctccccgatcccctggctccccagcacacattcctttgaaataaggtttcaatatacatctacatactatatatatatttggcaacttgtatttgtgtgtatatatatatatatatgtttatgtatatatgtgattctgataaaatagacattgctattctgttttttatatgtaaaaacaaaacaagaaaaaatagagaattctacatactaaatctctctccttttttaattttaatatttgttatcatttatttattggtgctactgtttatccgtaataattgtggggaaaagatattaacatcacgtctttgtctctagtgcagtttttcgagatattccgtagtacatatttatttttaaacaacgacaaagaaatacagatatatcttaaaaaaaaaaaagcattttgtattaaagaatttaattctgatctcaaagctcctcttggtttctccttctccattgaatccttgctctagacttcctcccgccccctttccctcttcctctggggaacatggcatttgtcttgggtctgggaaaggtacgtctaatgtgtaggatatggggtgacccaccttgttgtgctgggggcaaagtccttccattttggctgagctggtcctgggggaacccatccatcctgtcttgatatagaaggtgggaagctctgggaatgggtggagggggagaaacagcttaggagccaagggcccttgcaattggtagtgctgccttcaggaattagatgatccaggcccctgtcccttagccagggaaagaactggccatgtctccaagcttgctgcccaggagacaggagagagctgtttttgtctgtgggggtcttgttggctgcaacaggctgggagtgggagggggatgctgctggagggctgtgactccagggtgtaacttaattttacatagttttacaccctggagttccttgagcctctggaagatggacccataggtttggtcaccactgatgggacactccctgccccagcttgccataagctcttctctcacgtcctgctcctgggtaaggtggcacctatccaggtctttgacactgaagggcagtgcttccaaattcacttcctctagcctctcatttattcttgcaaaccatagatatggcttgaataaatattgagccagtcattgtgctgctatgaataagacacaattccacccctcaaggatctggtgaggatgggtgggtggggagacccaaaactataaatccatgagcagaaaaatacataaaatgtgctgggggcatctgatctagcttgggagtgggagttgtattgggggtggtggctggggggtggtgtcttatgacattatctctaggctgccacttaaagtatggtttgaagacagggagaacggggcggcggagtgaaagggttgaggacatcccaggcagaagggatagtgtgagcaaggcatgaaggtggcacttgggcaggggcagggagtgggtgggcagggtggaggctggagacacgggcaagggttagctccaagggagcctgcagcaccatgccaagagcctagggcctgtcagggatgagcagcagccgaggggttttaaacactgagcggctcagtcagatagacttttccataggtgcctggcaacagtatgggaggcagagaggccggtagaggctgttgtggtcttccaggaggaattgtgctggtggtggggaagcacctttggtgactggcagtgccggccattgcaaggtctcagcctcaggcagcttttggtctagtaagtgctcctttcccaatcactgaccacgtgccgacccctacattggttaacactgaatctgcacagcagccctgggaggtaggtgcttttttttttttttttttttttttgagatggagtcttgctctgtcacccaggctggagtacaatggtgcgatctcgggtcactgcaacctccgcctcccaggttcaagggattctccctcctcagcctcccgagtagctgggattacaggcacgcaccatcatgcccgactaatttttgtgttttcgtagagacggggtttcaccatgttggccaggctggcctcaaacccttgacctcaggtgatctgcccgccttggcctcccaaagtgctggcattacagatgtgagccaccgcgcccggcaggtaggggcttttttcatcccatctggatttttgctggagcctttaaattggccgcctggcttctcctctggccttcctttagttgaatctcacacaactgccagagtgagcctgttaaaatgtgagttaagttttggcaccttttgactcaaaaccttccagagatagttttactcggagaaaaacccaaatggccttaaaaggcctgcaccatttgggctgcctccctgactactcaatgacttcgggc

SEQ ID NO: 81 - DNA, 4681 bp, Homo sapiens
  source 1..4681: mol_type = other DNA
gccgtccccgccgccgctgcccgccgccaccggccgcccgcccgcccggctcctccggccgcctccgctgcgctgcgctgcgctgcctgcacccagggctcgggagggggccgcggaggagtcgccccccgcgcccggcccccgcccgccgcgcccgggcccgcgccatggggctctggctgtcgccgccccccgcgccgccgggctagggcgatgcgggcgcccccggcgggcggccccggcgggcaccatgagccctctgctccgccgcctgctgctcgccgcactcctgcagctggcccccgcccaggtacgtgcggcccgacagcgcgcccgcccgcccgccgtgccctctctcaaggttggcggaagtgaggaggcgacccgcggcctcggccgaggggatctgcggggtccggccttggacgcgggcgtctcgggggcccggcgcgtgcatcccctgggaggtgcccctccccgctggcccgccagccccagtctggggccactcctccgccccaccccgtcccctgggcaccgccgggggcggggctccctcggtgcctgcaggacctgcttcggtgggcactgtgcgcgctcctgatctgcatgcagcccccaaacatgctcggctccgcggcctggagatttggcgcggccaccagagcacctgttgcgttttgggccagggcaggtcccgggtggccaggagaggacaggtaaagctagagcagtggccgcaggaacagagcaatctggaaagatgtcagagaggtggtgaagcctactgatgcaagggcaaagccccagggacggtgacagggccacaccctcctaaagtgtaccttgggtacaggtcttttctctcccacaggcccctgtctcccagcctgatgcccctggccaccagaggaaaggtaatacttacaaaaactcggcactagccagcactaagagggtttgtcatgggccctgattccaggtgtccatcatcttgtgtaactcccctagaagattcaaactattattctacccatttcacagaggaggaaattgaggcagtggggttactgggatctggataaacagggcaggggaagacaggttgtgagggcagagtggggagggctagtggagggtggctgtgacttggggactggggaggacagatgctgggagcagctgcaggaaaaccagtgaggacttaacccctaccggtctgctcccagtggtgtcatggatagatgtgtatactcgcgctacctgccagccccgggaggtggtggtgcccttgactgtggagctcatgggcaccgtggccaaacagctggtgcccagctgcgtgactgtgcagcgctgtggtggctgctgccctgacgatggcctggagtgtgtgcccactgggcagcaccaagtccggatgcaggtactgggcaggtggggcaacgggcaggggatgcaggtactgggcaggtggggcagcgggcagggtggatgctggctggctctggggctggggcagcctggagactgatgcacaggagacagggttggggggagggctggtggccagcctcccggctgttgggtgagcttttctcccttcagtcttagagcatcccctttctctctctccctcactgtcccccctgttcttctcctgagcacagatcctcatgatccggtacccgagcagtcagctgggggagatgtccctggaagaacacagccagtgtgaatgcaggtgccagccaggcccaacttctgagctcgcagaggccaggcttggggggtgctgggtatggtggtccacagaactggggaccaggttcctaagagtagaaccaaggggccgggcgtggtagctcacgcctgtaatcccagcactttgggaggccgaggcgggcggatcatgaggtcaggagatcgagaccatcctggctaacatggtaaaaacctgtctctactaaaaaaatacaaaaaattagccgggcgtggtggcgggcacctgtagtcccagctactccggaggctgaggcaggagaatggcatgaacctgggaggcgtagcttgcagtgagccaagatcgtgccactgcattccagcctgggcgacagagcaagactctgccacaaaaaaaaaaaaaaaaaaaaaaaaaaaagagtagagccaagggtaggccttggatctggggcaacaaagtaggatgcttgggccgggggtagtggctcacacctataatcccagcactttgggaggcccaggcaggcagatcacctgaggtaaggcgtttgagaccagcctggccaacatggtgaaaccccatctctactaaaaaaaaatacaaaaattagccgcgcatggtggcaggtgcctgtaatcccagctacttgggaggctgagacaagagaatagcttgaacctgggaggcggaggttgcagtgagccgagaccacgccactgcactccagcctgggcaagaagagggaaacacagtctcaaagagagagagagagagagagagagagagagagagagagtaggatgctgggatttcctgatcttcctcttgtttgtctgtgtctgtctatcttacttttcagacctaaaaaaaaggacagtgctgtgaagccagacaggtgagtcttttggactccagctgagtaggggtatggggagtacaagtgagtccagaagctgttgctcctctttctcctcccacccgtcccccactttcccttttcctctgctccccaagcctgtgttctctgccccgaccccagctctagggaagactcttccttcccaccccagacatgtcgcttctcctccctagggctgccactccccaccaccgtccccagccccgttctgttccgggctgggactctgcccccggagcaccctccccagctgacatcacccatcccactccagccccaggcccctctgcccacgctgcacccagcaccaccagcgccctgacccccggacctgccgctgccgctgccgacgccgcagcttcctccgttgccaagggcggggcttagagctcaacccagacacctgcaggtgaggcgtctgtggggtggtgtttgtttgggaaggcaccaaggccctgtcctggagcaggtccagggtgagcctgccagtaggaggagggccagggaaggggaaactgttgaatgtgttgaacaaatatttaccaaacagctgctggcacctggagctgtataagcaagtccaacattctaactcaggagtcagatacaggagggacaatgccagcagaggatgtcaagggctgtggtgaggggtacctggcctcgtctttcagaggtcagagatctcttggaggaggtgacatctgcccggagtagaaatgtaggacacagcttttccagcttgcagttcgggccttcccagaagcccctgtggtagacatctgcccttacctacgggcttcaagaggccaggggacatagtggaacccttgtccacccttacctgatgtgtttctcaccatccgtgtcccgcagtgaggccatggggtgaaatcatatgggcagggccagtgggggctcccgaggagtgtcaggaggggatgacctttgcaaaaggttcatccttcgccctgcagcctccagtgcccagggccgagtggtgtggcaggatgctcaggttgtgatcttagtgggcccgaggcacacatgagtccagggctggggctgcgctccagccagcatgaacagatcacttcctccctcctcaggtgccggaagctgcgaaggtgacacatggcttttcagactcagcagggtgacttgcctcagaggctatatcccagtgggggaacaaagaggagcctggtaaaaaacagccaagcccccaagacctcagcccaggcagaagctgctctaggacctgggcctctcagagggctcttctgccatcccttgtctccctgaggccatcatcaaacaggacagagttggaagaggagactgggaggcagcaagaggggtcacataccagctcaggggagaatggagtactgtctcagtttctaaccactctgtgcaagtaagcatcttacaactggctcttcctcccctcactaagaagacccaaacctctgcataatgggatttgggctttggtacaagaactgtgacccccaaccctgataaaagagatggaaggagctgtccctgcctgtgtcactgtttgtcactgtccaggctggctggtttgggcatgaatgtctgcatcactaaatccagagcttgtcttgctccctcattgtgcagatggaggaaatgaggactaaggccccacagcagatcccaggcagggccagaattatgtattcatcactttcaagttattgccacgcatgggagtcagggatagcccagtcaatacagactgcctgccctcctgctcttcaccagggttcttttctagaaggagacagccttctgtggccagagagcttggggtaggacccagatctactgagtgaccttgcttgtcactacccctgcctctctgagcagcagtttccacatgtgcacatagagggaacagaagattgctgtggttggcgtcctcgggccccagagaagtttgagactatctttacgtaatagaaaagaacacttgttcttcctgccaggca

SEQ ID NO: 82 - DNA, 109212 bp, Homo sapiens
  source 1..109212: mol_type = other DNA
acttcggggaaggggagggaggagggggacgagggctctggcgggtttggaggggctgaacatcgcggggtgttctggtgtcccccgccccgcctctccaaaaagctacaccgacgcggaccgcggcggcgtcctccctcgccctcgcttcacctcgcgggctccgaatgcggggagctcggatgtccggtttcctgtgaggcttttacctgacacccgccgcctttccccggcactggctgggagggcgccctgcaaagttgggaacgcggagccccggacccgctcccgccgcctccggctcgcccagggggggtcgccgggaggagcccgggggagagggaccaggaggggcccgcggcctcgcaggggcgcccgcgcccccacccctgcccccgccagcggaccggtcccccacccccggtccttccaccatgcacttgctgggcttcttctctgtggcgtgttctctgctcgccgctgcgctgctcccgggtcctcgcgaggcgcccgccgccgccgccgccttcgagtccggactcgacctctcggacgcggagcccgacgcgggcgaggccacggtaggtctgcgttagggtttgcggagaacccgagagtttgcgttagggtctgcggcggacccgagaacctgcgcgggggaaagtgtgtgtgctttaagcttgtgtacgtgggatccaaagttactgagctcagtgcacgctgctttggagaaaaatcttcttctttttaaatagaaagttgttactagagaggcaagcaagttacacgagtgaagggcccggagaggtgcccagtgagagatcccgaaatctatttcagactggtttcctctggggcaaccaaggggtcttgaaccctgcccagtcagcggggctctggagagtatgagttcattttggtcgggaaatgctcgtttctttccccagctgattcatgggactccaaacagattctgggacactggtgatcagtcaacccagccttactttcctggagtgttcatagtctgcagagcaccaggcgctgtgagcgactttagaaaaaaagtgtcagggactttagtaaccaggctccagagctttcagagttcacttgaagttggtcagacttgagatgtaacgggagattagagtcagttagatcacaatcaagcaatgcaaggcttgtttcaactttataagctcttcattcctaaaatctggtcatgagatactgcaaactaagtttttttttttcttgtttgggttttttgtttgttttgttttcttttaaataagaggtgtttaatcctttgcctgaaaatgttgccaaaatacttttgaggcatcctgattttgaaaaaggatttgtgtgtgttcctacttcttactggctcttccaaaagagtatatctttatctaaaaagttcatacctgccataaccatatagagtatgcttaagagagttcctaaagaagttatattcgacatttcagttcaaacacttgcagtaccccttgctggaactatactgcggtagtttatttcaactggtggcaagtggagaggtacctgtggtgtgttacagtcaactttaatttgactgttgattaacacatacacaatgtgtagaaaatagccttatattttgaaatattttatttatatttatattttgaaatacacttaaagattgagaagactaatttttggaaatcaaactacctttgcatttaaattttgggaaaacattaaaatgttggaatgtgtaataatttaatataggggttaaaggaatgcctcttgagtaaaaacaatatacatgaaatagaacagactgcattctgtgaatcacaaaaataattttcagtgcctatacttacattgccgtaactatagtgatgaaaatatctttctgttcttaaataccgcagaaatgtaataatcggctcaataacgcttctgataatttgagtccttgattttgcagtacctatttgctatttctgcaaagtcaaaactagtaaaagtatgatttagtaaggcaacatctctgtattggttacggtcacttactttggtttacagtaagaaaatgtgcagtagagagtaaaatgagaaacattccctgataagccaatagcctgtatgagagtcactcactgctgggtgagtctagaattaatgtaccttgagtgtgtgtgtgtgtgtgtttacgtgtgttatgtataggtatgggattggaggattaaaaaagttaacttatttttaactttcaaaagtgtcttcgttggtgatgtaaaatttgccattggtgatatggcaaattttaccattgctgtgaaaatcactatgcatttttgtttgcaaatgtcgcttttcatatttaaccatttttatattctgtatggtgaatatgggttagtattctgcatgtgatgtgggttcctttcctatgtgatgaaacatcatttcccatatgaaacatcatctctgagttccatagaccacaaagcagtatttcattgctccattaaagtgtcgttccccagtgggtgaatagagccttgacagggcatgtgtcattaatgcattcagtgaaactgctgtgtccttgctatgaaacatgtcacacaactgccaagaaactgatatgaagactctatgtctctccctagtggcctgtacaagcaccacatttagatttaagcactagagaagaactggggagaaatcaattgttaattttctataactacatgaaccccaagaaaatatttcagaaggtaaacagaagatgctaaatatctataatcccaatagatgcaatgttttcataactttcacctaggaacttttttaatatttaaaaaatcaaaaatagcacacaaactatgaaccaaggttagccatccagcccttcagcccacccgtaaagccatgcaaaagattgtaggtaaaaatcacaaatagaatgaagatctccttattcctcgacttatatttgcatttactggattcctatttctagttatttgtggttgcatgacttactgaaaagtcttaaaatgtttctctgaaggatgttaacacaaacaagacagtgtcaaaaaagtaaggcaggcaaaagtaaaattaactggacatgatgggaacaaaagagaatagcaagtctgaagctgttctatttacaatttttcttatagtatatgattatgtttgtcaacatctactcttataagagatttctgacattcctctgagtgatgctacttatatgaggttttagatatagaaagttcaattcatctttcattttgatttccactccattatagtcttctgaactatgaatatctgattgatagctatttattcacaagacagttatcaaaattgcttcatagaaagcagttaattactgatcttagtggcatatgtctaagacccgtagatctctaatcctgtccttttcagttgagttgagaaagacggagggtagtggatttagatttcattttggacttccagttctggttccggttcctcttgagaggaaggtcctggcctcctagttatctccatgtgtccaacccagaatgctgtttctcagctcttgctggggttttcaccaacagaggaactggcgtgagactaatgaaggtttcccgaatccctgggactgtgcttgcctgcttgcctttggcagtcctggggttgttattgagagtaggagtttataatcattatctgtgatgttcataacgtgtgttaagcacttcgcaaagagctttgcaagttagttttgtttttcactacacctccataatatggacattattttatttcattaaggatgatgaacccaagatctgaatgacttaaccaggaaaaagaatagatgtttttttcctttttttcttttaaaaaaagttttatggcatataccaacagtccccgacttagaatggttctatttaggacttttggactttacaatggtgcaaagtcgatagacattcagtagaaaccatacttcaaggtttgaattttgatcttttcctgggctaataatatgcagtaaaatactttctctggatgctggacaatggaagtgagctgtgaccagtcagccatgtgatcgtgagagtaaacaacaggtactctactgtatattaaatatattttcaactcaggaggaatttgtcaggatgtagccccatcgtaaatcgagaagcatgtatgttttagagaaatgtggtaatgggtttgggcctttgggcctgtgattcagactcctttcagcccctctgctggtctcctttggcacactatagcagcgtgcaggaaggcagagaaaagcactgcgtgtgactttgcagttaggggcaccttgttgcatttatttaggtcctaattccccacaacgggacaaacggaaataaacccagactttcttccaggctttaccacatggtgttcgtttgactaaagataaattataaatgacctaatccatggtaatattataagaacgactgcttaactggaggcttaacaagattttctgacaaacggtttttcaaagttgtgctcaagtaacttcagtgaaagattgtgattttacctctgccaaatgacctttcacaaataagtggatttggaaagaacaaatttaagttggcagaagcgttatacttcctctgacttctgagcatatattgtttcacctttcaccagttacattattccttgtagatgtgcattttataaatactatatgggtctaccttttgttacaaacacatatttgtatgtacagatttgtataaattgtggattaagttatcattgatttttctcattagaaaaaacagatatagcagagaactttaaacaaggagagatgctgatgagtttgagttatagtgtaattataaaatttactataaatattttaggtttgtgtaattgtttttctgaaacttactagtgtaaatttttggggtggcttctttcctcggttgattaattttttttttcagagtttatgtttaaccatgagaaagcagagactgtttttatttaatttgctttattgggcatccatcatggaattaatcaaattgtacattaaatgctttgtcagtggattagtactgtttccttatactgctcgcgccctagtggctttcaggtgttaggagttatccacgatagttttttttccaattttgaaatccaaaaactcattttctttttctttctttcctttttttttttttttttgagacagggtcatgctctattgcccaggctggagtgcagtggcatgatgttggctcactgcaacctctgcctcgtgggttcaagcgattctcgtgcctcagcctcccaagtagctggaattacaggcatgtgccactagagcaggctaatttttgtatttttcatagagagagggttttgtcttgtaggcgaagctggtttcaaactcctgacttcaggtgatccacttgatctcctaaagtgctgggattacaggcatgagccactgcgcccggccccaaaagctaattttcttaaattatttggtgctataatcctgatctgaactgacataaggctatttatagtcattattatctaatttaaatatttctaatcttcactgggaaaatagtaatgtatttatttacatgatgctgccatcagtcctgcttgtttttggggtgtgagtattaatatgtctatgcacttggtttccagaaaaattccaggttcagagactcttgcagtctccaggcattttggataagcagatggattgtagccctgttccacaggccttcctccattgctttattgccttggggctgcctggaagaggcagggaaaggtaatccaggaattcaagaaagaagccatgtggatgctcctaattcctttttacccattagtaccaggtttatttgctctttaatctacttcaactcatgttaatcagttcttactagtggcagcttcagttctaagcaggaaattacagttcagtgtgtgatgcaaaaaatgtagagtgagtgatcttgtctataacaagcttataatcattttggagaaaataaatttactcattaaaaatactacaagtgaattaaactataaatccagaccatgtaagtggttttgtaagagagtcttgtgagttaccaccagttgttggctagccttctgggagttgcatgggcaggcctgggaaaggtggaatgatatgagacccaatgttaaaaatgagtagatgctaattacagaaatgggggagagagggatgttttgaatattgaagaatgacagcaaagtacagaggaagtaaaggtcagggatatttggggaactagaagcaaaccctttggtgcaaaagtcaagagctttaagggaaactgaagggagcatggtgggaagtgtgaaaaccaaagagaaagtctgagtttgagttgaaagcagcaggagccaatgaagattctttagtggtatgctgaaagtgaggtttttaaggagcttaacctggcattgttgcacagaagtgtctaagaaagctgaccagaagcttctcagaagcttctcagaagccattttcaactgcagggtttcttaaagtgtctggcagtgactctgcctttctcattacagtggccacccatatatggtattcgaactcctctatatgctcctgattgctggcgatgatagtggtgattacttttgacttactgtaggcacccatcattgtgctatctggatacatttacaaaagtatagaaatagacatctctgccattatggtttgcattccaaacgaagcaagcagtgtaaacagtggtcatgcttagatacacatacacagaaccccccacacacatattcatgcatacaccgcttaatagttcttcagactgccaagtgtgacttacgtgttctttcttgcatggttaagaatttgtagacagttcattgaaatagaatatttagacaatcagaagtgtacaagattagaatctctatatttgcacacacatttatttgtaggtcagtgggcaattgaaaaaaaagagaaggagagaaccctaaagtgtcctggaaattcctgctttttaaaatctgctaaaaatgagaccagaaaggtgggagtggggatgtgaggaggtgggtaaactaccaaataaacaatataaatactttggctgttcttataaaaggtttttttaaatatggtggaataatttactcaaactcaagagatgccacctactagagaaaggacatactgaaagaggaaatattcaaatgcacaactttgtgtaaaaggtaatacttacaagtttaaaagactcacttctaaagaagtttggcttcaacctgtcctcatttggacaggtggaaagatgtatattttggggtagaccagaaagatgtggtttgacttctatagttgaaaggtttctatttagacatttattttgtaatttaatttacctaaaacttcatccctaaattaccattttctcttacttttatgcaatagtaaagtatgcagtcataagtgataaaggctgggatcaaagctagctattttgctaactgcagaacctatgcactctgtttacactgcctgtgatagcgcctggaagaactcactgccaatatttctgcttgtttcagtcacataactgttgcttgtgtcagtgacgtaacttgtttagagatgcagtgcagtggataagagcacagggtatggacatgcctttctgtattcatgtcctgaggatgcctcttagtacctgtgtgaccttggacaagttacttagtttctctctgcttctttgtagcacaatgagtagatgctaatttttaatttttaattttttctttttctttgtgtctgttttgtgtatttagttactttatctttttttttttttttttttttttgagacagactctggctctgtagcccaggctggatggaatgcagtggtgctatctcagctcactgcaagctccgcctcccaggttcacgccattctcctgcctcagcctcctgagtagctggaactacaggtgcccaccaccacacccagctaattttttttttatatttttttagtagagacggggtttgaccatgttagccagaatggtctcaatctcctgacctcgtgatctgcccgcctcggcctcccaaagtgctgggattacaggtgtgaaccaccacgcccagcctagttactttatccttttaaaagtcctcttccaaaatgtagaatataattaatgcctgcttaatcaggttgttttgaggataagaatgtgtatataggccaggtgtggtggctcacgtctgtaatcccagcactttgggagtctgagtcaggtagatcacttgaacccaggagtttgagaccagcctgagcaacatggggaaaaccctatctctacaaaaaatagaaaaattaactgggcatggtgacacgtgcctgtattcacagctactctggaggctgaggtgagaagatggcttgagcccaggaggcggaggttgcagtgagtgagctgagatcaccccactgcactccagcctgggcaacagagtgagactctgtttcaaaaaaaaaaaaaaaaaaacagcatgtgcatacatataaagcccttggaaccatgattggcatatagtaagctttctgtaaatttgtgttaaatagatagtcttcatgatcagaaaacaaacaaagaatatagcatgtaagtactatgtcctagacatatgacataactgtgattcttcagcaccttgcaactaatttattaaatttttaaaattataaattactgacaattttcccaatttctaaaatatagcaagaggatataatactgatgtttgattttgaaacaggtgaaggaaatgcagggtgtttaatcattcagtgtctggaggctacatactgtagttctgcctataatatgttcccacttcccctgggtgccggggtttgttcctctcctggagggcagcacaggtgtccatagaccacaccaaaccaaagaatctgggatgatgctgtctccttatgtgcttcattcatacttaggtcatttggctgtaaaggattttggtacacataagctttttataatgccatataatttaatatgaactcatcttgaatatattcagagcatatacattttcaagtttaaatgtttattaatgaaacatgctaatgttgctactttgatgtgtaaatatctcatctatattattgccacaaaaaataaatatgcattctaaatttacaatgaaatcatcacagaatacctaaaatatcaacaatttcactgaggaaaatataaagaaaacttaaggggagaatgctatatgccagagttaaacttgtgtgaatttgtttaggaaaatgtgattgcactgttcctaagggaccctcttccagaatggtaactagtacagcgtgtgctgtctgagatgtgcggacactgggacactgggatgaattatggagtagatactttccttctctgagagtaagctgatttgcttgagtactctagtttattccaaatagttgattttgtttggtggttctctttgtcaatttgccagtcagtgctgtgacttgcgtggttaccctgtgctgaagactacagtgctgggggcattggaggcccgtgagcagacaggaaaaagggaggaaaaatcagtggtggacacacttcccagctcttgaacagctgacagcatatttttttgattcagtaacatccagaaagtattcacttccctaggattccagtgcagatgttagttggagtattttagaacttttgaccagataccacatttttaaacagaattttttttctgactggaactggaacaaagcactaaacactaaatagaccctcaggtagtatgtaagtacattaaaaattagataatactatattattcattcacatctctatggagatactgtatcatctttttaaaagcaattttcgtattaatatttgtatttcagaattagaattgtatgtaagcatataataaaatgaagctttatagttcagtgctattatgttttcccaattatagaattcaaattaacattttaatgtgattttcttcatagtaatttttcattgtcacactaatttatttttctctcaacttttttttatttaaaaattttttttttttttaatttgagacaggcctcactctatttcccaggctgcagtgcagtggcatgaacgtggctcgttgcagcctccgcctcctgtactcaagtgatccacctacctcagcttcccaagtagctgggatcacaggcacgtgccaccccacccagctattttttaaaattttttgtagaaatgaggtctcactaagttgcccaggctgctctcaaactcctgggctcaagtgatctgccttggcctcccaaagtgctgggattacaggcatgagccgctgttccagcctaatttctttttctcttacaagtgctttgcttacatttttattgttagaaacaggattcaaataactgcttatttaatattctttttatgtagaagaaacagtcttgaacttgataatacttttggttccaacttgttaaaatattggaaaaggatgaaacatttgtgaaaataatcagaccttggcactgcggtagttgaggaagagtcatgcgtgtgagtgagtgccactctgagacaggcagcactttctcccttgtggtaattgaatagggtatgggaagccgactacttaatctgcttcaggcaagcagtgttcaaagtttaacgcccttttactgaaatgacaaacataatcaccttacctaaaaggatgtgtgggtaatgattttaccaaatagttcacttggtgaacaatagtgaaaacagttcaccttcccttgtctttgtttacaattaaatgagcccctccaggtccctccctgccccaagagtggatgaatttggcaaatcagactgaaatgttaaagaaaatggtcttgactactctgttttaactgaagtgaccacacagctgccatgaatcctgtgattgaattcctataacctgtaaaagggattgttatttccactcactccaaatttcttggaagtagctagttgatatcagataccagatgcgaggctattttaaatcactgtgatttaatttactataatatcattgcctacatggaatatttttaattctttctttttgtttgtgtctgttttgtgtatttagttactttatccttttaaaagtcctcttccaagtttatgttttgaaaaaagagaacacttactgagattcatgtttgcttacaggtcatgacatttatgacttccctaaaaaacaaactgatccctttgtctcagagccaaattttagttttaacataatagtgattcattgtttgttctctctgagtcctagatctctcttttaattttggtgtctgtccatgccaaattagaattttattaaggccaaaattattcatgagtcatgaccatcacacttaacaattgggtaatttgaagctgcttcagatacacattaaagcaaataatgatgtcataaattttaatgcaatattttttttcctttaatattggtagcagtgaagcctgctctgttagagaccaattctgttttactttagaaaaatgtacctttgtgctcatgtccatgagagcacagtgtagttattttattactataatatagcacacagtgacacataacttagtaaattaaagattgaaaatatttaaaattggtgattttttgtgccatgttgatttgacatttattcttctatctgtctaaaactaggagcagtgctagtgtgacagcctcaagtcatgttaacacgacacacgtagaagactgacgctcgggcttcctctagtgcaaaacacctgaaattcaaattttgcttttctgtgctattttcctaattaaatgtatccttgatgttgagtttaactttattacacccctgttaaatatctgcaatgtgttgggaaggaggaggacacatatgcctgatttaaatttaatataactgtatagatataatttcattttccattcaatcattgaaatgatataaattaatatatgtacagctaaaattaaatctgtgatgtcgagatgaactccatgctgtccttggtgcactgtgtattacacatgggtattaaatgcgtgcttagtgcttagtgaatgggttagaaggagttttttttttttttttttgagatggagtctcgctctgtcgcccaggctggagtgcagtggggtaatctcggctcactgcaacctccgcctcccgggttcaagcaattctccctgcttcagccttctgagtagctgggattacaggcacgcaccaccatgccaggctaatttttgtattatttagtagagactgggtttcaccctgttggccaggctggtcttgaacacctgacctcaggtgacctgcccgcctctgcctcccaaagtgttgggattacaggcgtgagccaccacacctggcctagaaaagagttttaatagatacccctgtaaaatgccaagcaatcagttgccattactaagaactgcaacaagttccagttaaagatgtacatgtttaagagctgtcgttctttaataaaatatgaccaagatgtcttaaacatgggctttaatacatgttactgtgggtttcactccaacttaatagcacacaaagttctgaagacacatgatttcactggtggtacattcgcacattgttttctgtccatgtttaagttcattcttgtccagaacagtttctggttttctaagcctaacgtattaacatttgagttaattaaatcgatagggagccttttatctttttttttttcctatctgggggctttgctttcgcactgacattagcagttcccttcctatgtgcaataggaaaatgtgcagtcattccaggagcatggtctcctcaggaggttaaaagtgattgtaacttagaggttaatgtttcactccagaggaaagtgtttcaccccacttgatgatgtgcccctgggtgctcacagaaagagtagtactcttttttaaaccaaaattttagacacgtgttatgcaaatcttctttataaattacacattcttttctttccttttattcttttactccagtatactattttgcaattaaaacattttaaacttcttccagaaaaaaacttcttccaataacttcttacttcaaactacttttactaatgacaaaataactatgtccatcacagtgaggaattattcattgtttataccaccttgtattacttatataaatatcatcctataaaaaatactatatattgggactagattttcttaaatttaaatttaaattcttttggaaaatcaggttctatcagctctgttgtcttttcatctctaattgtacatcttcccactattttgatttatacatgatgttattatattaggatagctttgattttaatgtaatattagctagttttatggcttgaaaaacttagtacatagactatattcataaatacagcactatacattctagcatatggcgtgtgcacttaatctgaagaattagacattttttcctgttctgtgatgattgattgattggtggtgggggcagaaggtggccagtctttggcaacatgtaaaattttgttaaaattttgtcaaactgatttattccattgctaaattttgaaatcagcatttttttagggggaatatctcgagtttatgaggacagaaagaaatattcttagaaaattgagaaggttttgtccctgtacatgcaaactagggggtgtttagatcagagcaaatgtcttgcagcaggggttgacgccgggccatgtttagtcatcaaagcatgacttctattctgggaatgtggtaattgagaggtaaatattatttacaatagcccttataaatctttagttgttcaacaaaataacttgccatcagagttagatgatttagctaaaattatttaattgggttattcctacttgatccaacatttgattataatatatgtagtagcgttaaataatttgggatttctggcctctggctggctgttgaagactttttgttggtggcggggggcatcctaaggaacaacttgccctctactagcattctttactagaaaaagctcctatttacttgttttttttttcctaaatatgtgttttatttccttttggcattgtctttcttgctcccaattataattgtgagcaaatagcaatcgaaattctgtgtaacttccagcacagtttagtcatcagagcttgccagcaagtatgtctattgtgaggaaactgcatttgccacagctagaccatcagcaagtgaagtcgtattgtcctctgttttgtagttgttttttcctatttatgctttactctgattcaagttcagcatctcagtgatcataattgtggggaaaaaaattcattttgaactataaacagaaaagataccaagttgttgtatttgaaagattattttagaatgtggttataccttcaagtaaaataagctgtaaaataagctgaagaaccatatatttaggcacattttgactataaaatagatcctctacatataacaagaatagctttttttttttttttttttttttttttttttgagacaaagtcttgctctgtcgcccaggctggagtgcagtggcacaatcttggctcactgcaagctccacctcctgggttcatgccattctcctgccccagcctcccgagtagcagggactacgggtgcccaccaccatgcccagctaagtttttgtatttttaatagagacagggtttcaatgttaaccaggatggtctcgatctcctgaccttgtgatccgcctgcctcggcctcccaaagtgctgggattacaggtgtgagccacggagcctggcctatatataacaagaattgcttttatatgtctatatgtcacttcataatatttgtttattatttagctagttattgcctataagccagtatttaggtattatataaaatctgaggaaaacagttctataagattcagtaaaattccaattctataagattccaagatgtaaagtgttttaggtatttaaaagttttatatagacaatagtgactcatttgttatggtatatgaatatagacaagaacttagactgaagcaaaaaataacaattagttacatagctatttcaaagcccatgcagtagttttttgtttgtttgtttgagacggagtctcgctgtctcggccaggctggagtgcagtggtgcgatctcggctcactgcaagctccgcctcctgggttcaagccattgtcctgcctcagcctcctgagtagctgggactacaggcgcccgccaccacgcccggctaattttttgtatttttttttagtagagatggggtttcaccatgttagccaggatggtctggatctcctgaccttgtgatccacccacctcggcctcccaaagtgctgggattacaggcgtgagctaccgcacccggccagtagtttttaatgttcagtgaagttaaaacatctcccgtccagttatgctgtgtaataaatattaaagcaggagatattagaacaatacaacacttactgtgctatttataatttaaaatattaaagataaataatggaataactataaatattgatactatgataaaacttttagcatgtctaagttgttcattttgatagatacaaaaaaccaaagccaagcaaaataaaacacacctaaaactttatgaatgttaacaattttctatttttgccataaatctttggccgttgcaccatattttattgaataaaggacagttgttaagctagggcttggtccactgtgtgtcagtatcaggatgtgatgattcttttctgacccatattcttctctctctttggctttggttctcttgtacgactcttctgtaggtggccttggccacacctgtgaaatatagggcacagttgtgctgcttctactcattgtgaacttgatcatatgttttgtattgtgcctctcttcattggctcctttttattttagtgtaattcaaagtgttaattggaggttttaaatgtagttttgaccaaattgtgtttgaggtcacatgtacccagtttaaaaaacgaagaaaaaaattcaactcacttcccagcgtcctttgcagctaatgttgccctcgaatagttcttgctcataagagaaaatctagcagggatttatgggaaaacttttgcttttttttgctaaggcactgcttttcttcttgttcccttatttccttccatggaaatcagaaaatgttttataattttaaaactttacctttgtttctcaaaataacactttcagacttatgtaaagcaagattttaataattaatatgttgcctcgattatggagtaactttccaaagttgtactatcatgatcttaatttattgacccttagggttaagataatttgtgtgtttataacctaacattctttgcttggctgatagattcctttaaaatgttatgtgtttatattttgtacatactttaagaagctttattcaattgccacatttcaaataaataaaggttcttttttttttggtaagcctatacctttgtttcttctagcttttaaaagtgttaatagcgtgggaatgacccttgaccatctctgattgtttgggaaatggtaactagaaagaactgagagaggacaaacttggatgagaagtctcagaactgatagtaaaaacaaatgcaaacaagaaaatatattacgtacttcattcagattaataagtaattaaacacttgaactattcaaaaatctagtttgagtctaggcttttgcaagcctgaatttgtcatcataatcatcaaaattagaaattacgaaagaatgttaatttaaatttaaaacagctggaaatacaatacatggcctataagcttatcttctcatctgtcaacaactgcttgcatatgtcacatgaactgttttaactgcaattacaaaagtcaatggaatgtttagaggtgattcaaaaaatgtgattggctgacatatagagttatcctaagaaacaggctgtccaacacaattttaaatatactcaagctcttttatactgattaagagtttcaagttaaggttttgggttaaaaaatcaacatcaaatgataaataagaaatataatcttgtttaaattatttattctaatagtttatttatgaacacaacatatttctctttcattactttttttttctcagttgtaaaattctagagctggagcccataggccaatccgtagtatatctgaaatgattaaaggttttatacttgacaagccctctgtctgcaggttacttgcttctacttggagcagtggatttatcatcctccactccagggtaaatatctaaaagtcacttctgccacgttatttcccatctggtagattgttataatacctgtgagtcagtattatctgcacagtgtatttcctctgctcaaggcactttgaccatatgaggtgttcacatctgatcaatcgggctgaagcttgccctagtctgaggctggaccaattgatctctaacgatattcttacctgacaatctagaggatacaaatcaagatgtttcaagtgcagaaagcaacagtaaagcataagttctttttttttttttgcattctttttttttttattattatactttaagttttagggtacatgtgcacaatgtgcaggttagttacatatgtatacaagtgccatgctggtgcgctgcacccactaacaagcatatgttctaatgtgtaatatatcttcaagacagtctggaccatgaagtgtatttttacttattgagtgtatatgggaggatcattttataggattggttatatttttccatttcttgattctttgatacttaaatttttggtttcatattctcctctttcacatgttgtccccattttacatatgcaaagatagttgtttgccacaaaaataaacatttaacagactccaaacacatagactgtgtaattagcataacgaaataatagtggctgagtgacgagcagaagtgattcactcatttggctctgtggctttcaaagttattaatgatgttacatattcttctctattttatttaaaaactaacactcataaagttaattctcataatttttgctgggtttaataattcaaaatatgaatcaaaatttttatttattatgcagtttcattctattaaaattatctgctaaattaatattaagtagtcctatagcatatattatttaataattgcaagtagtgacatatcataaataaactgtataatatgtattattgattctgttatttttcctagcaatgcacagggaaccagtaaatttcacaagcagagaatactaacttgtcatttatttaatattctaaacaaatgaagccgcctctataagtgaattttctggacttctaaagatgagcattgttgagtttaataactcaaatttttattgtgttaagtaaagtatattaaatataacctcaccctaatgactcagctgtaattaaaaaagagttcacgaccagcctgggtaacacggtgagaccccatctctacaaaaataaaaaataaaaatgaaaattaaaaaaaattagccaggcatggtggcatatacccaagtactccgaaggccgagggtggaggatcgctcaaacctaggagtccaaggctgtagtgacctgtgatagtgccactgtactccagcctgggaaacagagcaagaccctgtctcttaaaaaacaacaacaaacctacacatgaaaattattgctgcttcccatcaattttcagtgctatctttatttaacctctctactatttgccttcactttttaaaattttgcttttattcttctttctttggtctccttctctaaaatttttcccctgcttctgtttttttgtatactaggaagacatttattatttttataggtatgatcaaattgtaaaataagtttatttcattctctggtgatttcactaactattttgagagtatcagttaaaatgggatttgtttgtgtgtaacaaaatctaactgtagtggctaaagcaaattggagtttatttttctctagtaactaaaaggccccagtgggcgtttaagggctggtaccacatggagcaacatcatatcatcaatgtccagactcctgtgcttttttcacttgatcatttttagagtttggccttctgtgcttcattcctcgtggtcacaacatggctgattgttgtgcagctttatgtctgatttcaaggaagaaagaatagtgagagaggaggttgttgccttaacacattcaaaccaaagcaaaagttttctctgaaatccccagtagatttgcccttacatcttctcaggtagaagtgcatttttgccattcctggctgtaagagaagccgataaagaaaatacatgcactttctaacaatattgaaattcttttcacaaagaaggaaaggagaatgaatgtactttgggtaggtatcgtggtctgttttatgttgctgtaaatcacaaactggatgatttataataaaaagaaattagttttcctcacaattctgaagactggaaagtccagggttgcagggctgtgtctggtgagggccttcttactgtgtcttctcatggtggaaggcatcacatcaggagagatttctccagagtgcaagaacaggtggaactttatataacaaactcattcctgtgataaggagcccactcccaagataataccattaatccattcaggtgggcagagcctcatgacctaatcaccttctgaaggtcccacctttcaatgcttttgcattggggattaaatttccaacacatgaagtttggggaacacattcacgctgtagcaggaggcaaccacatttgtgacattgcgtcattgtactttctagatttgttttctccaggttgtttgcaacgttgatgtactctttgtatacccacctgaaagattaatgttactgaagtattgtgtttaagaaagaaagatgaatgctaccatgtaagaccttttgactgtccaaaagattaaaattccagtttggagaggtagcacttacatgaaaaccttataaaacatgagaacttaaacttgctaatttcattgtgtcaaatcgcataacagagaaaggaaaaacttgaaggccactcctcttgaaaaagtatttgagtagtgtcgatttcagtgtaagaccaattaaataatgtcaaattaagtaaatataacattaaaatattttctttaacatattggtgttgatttcacttttactctgtaatttttgtgacattggaaacaggaaatattcaaattttgccttcttttggatcgtttcctctccgtttcttaatgtgtaaaccgtaatagggctttctgcagccaacgtgctcattcttttctttctgttaggctgtgccttttctgagaacagttggtactgatggagatttctgttctttttcttcacacaagtgtcatatgaaaattgggggatcagctattttcagatcacaggctcctctgataacagaataccataattccaactttcctgtgttgatttgtagatcccacactgtgtgatcatgacaaacatctaagcataagagggcgatgaatgattaaaatttattcactcttcccataaaacacctggtacagatgcagtgtgttgtcctcacagaggaaaaacagtggttcctccttccaagtggcgtgtccacagcactggtaccagataacaagaaccttagacttttcttgttgctgcagtgtgtctacctgtgcctctcttaagtgtcttacacgttactcacagagaaagaaatacaaaaatggaaaacataagctcacaaaaatgcatttagtgcatttatgatgttaatggaaaccttggatacagtcctctgttatttccttactactcttgatattttacaatattgctttattattcaaattcataatcatatatgtgttaaacaattttttttggtaagtagactgtgtatcaaacttaagagggatttgacatggaaagacatttaaaagatggcagaaaacagctattataagggcatttgaactttagatattttccgttggtcagtttccatagatcatcatctgattcactagggtttggccagtttatattatttaaattgtttcccctgcaactgtagtattttctttaatgttttgaattattcttaatgtgacttgaataagggtaattgtcacatatgctgatgttttcccattaggatgaaaatatttagaaaagctgtactagcaaaaaccaggttaacttgttttcaaagtagaatttaattattttatttcaagctttgattccttttttaaaaattaagtaaatgtccttgagagcaatacctttgtgtgtgtgtgtgtgtgtgtgtgtgtgtatcagttacttgcaccttcaattgaatgaaagacagtagtaggttgtattatggcagaggggtagaagaatggacattctcatgggtatctcaaaggtcaagtcagaattggattccctgtggatggaagagaggagtggagaaggtgcttctcatgtggaaaaacaagaaaagtctatgacaggcctcagtgtttgccagctgcagtggaattctcatagcttgtattgaactctgtgtcctaatcttctgaaaccacctcaagagagtatatattgctaaaataggagctcagctatttttcaggggcagtgatccagaggacactataacagaaatagataatttcaaagtcgaaaatatattagatactatttttattctctatctggaaagtctgtatagaggctttattctggtctgctttctcagataaatatcctattcaggtcactggaaataatatgtcaggttttaaaagagacttcatatgtagccaaataaacctgctaagcatatttagaaaatcatgctagtgactagtgtcttaaactgtttccacaaaaacaatgctgttaatagtaggatttacccttttgcattggaaatgagttgtcaaggttaaaaagatgagtagccagatattcttgctaaacatgttttgagaagaaatttaataatataaagtttttgttaaatgtggcctattaattttaaacaataatactgactgaagtcattaggtagctgtggaaagaagttagcctggtttttactaatgtagcttttctaaatattttctgcctaatgagaaaagagggataagatccaactacaattggaagcttaaatatttaatcaagtttgcagaactactattaagatcatatgtaactatcagatattttttaatctgaggacttctttctagtaaatagaaatttcttcccaagcattataggaatatgtcttattgacttatttttttggcatgggttactaggaaataatattttcagggagttcagggacccagatttgattcccagataattcagattaaccttctttaatcattctattttatgttattactggagagtacagggtaggttgaaacagcataaactgccaaatcagaactggatttgaatttagtgatgggcctcaggagctgtatgaccttaattctgtgagtcaggctttctgagtcaggctgtgaactgggcaaaatagtgtatacgttacaacattgtaacagagctcatttaaagcattgtctcatgttagctactgataaagcattagttcccactccagggcctgttagaattctaactccatccctgtgagtcatgttcatgctttcgtggttctcatttgaggttttgtgaccaaaggccccacagatggaataaaattaatctaaatagccatttattaatgtaatatctgctagctaattacatatttattaaatataaataacaaatagctccaagataccagtgacctccatgttgctaaagccaacagttattagaacttctctgttctgtgagcttttctgtgatggtcacaggtgagaccgcaagaggacacacaggagaggcacaatgaaacaaagtttattatactcataggtcttagacaggaggtcaccgcatgccacacagggtcacagggtgtcttagtttgttcagcctgctataacaaagtgtcttagactggataatttataaagaacagaaaattcattgttcatagttctggaggttgggaagtccaagatcaaggagccagcagattgggcatctgctgagggcccactcttcatagatggtgccttgttgcacgtccccctcacatggtgataggggtaaggaggaagcaggctctcccaagcctcttttataagggtaccaatttattcttgagggctccaccctcatgacctcatcatctcccaaaggtctggcctcttaataccaaaacgctggggttgatattttaacatgtgaattttggagggacattgacattacagaccacagcacggggggtggggggtggttctccatgtggcagaagacaggaaagaggagagagcttatgccacagcctttactggagtttcagggtaaaggcaaggcagagtagagtagggtaaacagtttagaactggctggtttgaatactttcagtaggctctaaggtataggattaatccctagttgcttgatacctgacagtgggaaattaaggcagaggaatattgtctcctggggtatatagccagataaaggaggtatggctctggattgggtaatttgcataccaaaggtgttctccctgctgaggtttttgctgtctgtaaggattggcagcccctggagggccatctctcccaagccataaacttttttttaagatgtcgaaatatcatagtactcagaaaaatttgaaatatatatatatatatatatatgtataaaacatcctcttacttggcagcatttacaatgtttgatcattatttttcagctttgtcttcaatgcactcattttacctcagtggtggttactccatcccattctccactgctggctactctccttgaacttttaatgtcgaagtgttcagggctcagcccactgtcctctattatttttcatttctattcactctcttagtgatttaacccagtcccatggttctagatatcttcatatctgtatctttagtccaaatctgtcttcttaactttaaaatataactagctgcctttgtcatttccactcagatggctaacagacacttcaaatttaaacattcccagttgaaatttttatctctccgtttctgatcaaatttgctctagctctacctatagccttccctaactcagtcagtggcaacaaattgctccgagttggtcaagtcaaaattcatggtatcatccttgacttctttctttcctaccctacattcagactcatcagggaatccaatcctcttggctgtgtcttcaaaaatataaccagagtctaaccacttgctacatctctgacctgagccaccatcgtcttccacttggatcagggcagcgttctgtttaccagtctcactggttcttatcttcacctccctagagtgtattctcaactgagcagaaagaagaatccttttaggatgtaagtcacattatattcctctcctgttatatgtaaggccctagaatagttccctacttcacaaaaagtaaaaaccaaaatctctatcaagtaatagtagtcattgccctggcagtgtttcaattaaaagagtttaacgactggttcattttatagaggtgtggacagtgtcaaggaaacagaaaagaacaaaagaacatgaagcatccaggtactatcaacagtgggaagtcctaactaccctagtcctgcaggggcaaggtgagcgaatagtgctatcagccctggaaattgctgggcactgtaggagaggggctgtcaatagaagctctaactgtagagtgcacacacttctctcactatggtgaggcaccataaatgtggtgaggcagagggagagtgaggagaatgaatatccaacctattttttcttcacatcccagccaaatacttggcattgttagtcttttttattttagctattgtggtggtgatgtaatagcatcccattgtggttttattttgccttttcatggaaactgatgaagttggacatcttttgacaagcttgttgcccatttggatatcctcttttataaaatgcctgtttaagtgttttgttcatttttctttttggttgtttttttttttttttttttttagatttctacaattcctttacatgatttggttgccaggctttttaaagctgtgtgtattgcagatatcttcttccatctcttactggtcttttttctttctttctttctttttttttactggccagatttctttaattttaatgtaaggtgattttttcttgtttttcctctatgattaatattttttatgtcttgtttaagaaacatttgtctatccaatgttatgaaaatagtcttgtagaagctttattgctttttcactttcagatttatatttacgatcaacctggaattgatatttgtgtagtggggagggtagaaatcaagactagttatttttaatttggataactaggtaacctagcatatttctctgctgctctgtagcattacccttgtaaataaatcatgtctctatacggtttctttctggactctgttttacgattgtatgctctctggcattagtatcacactgcctgaaattctgaagttccatagtatcttttcttttccttgtttttttttttttttttgagacagagtgtcattctgtcacacaggctgaagtgcaatagtgcaataatggctcaccacagccacaatctctcagggtccagcagtcctcccacctcagtctcctgagtacctgggactacaggtactcaccactacacttggctaatttttgtgttcttctgtagagataaggcttcactatgttgcccagactggccttgaactcctgggttcaattgatcctcctgcatcagcctctgaaagtgctgggattatagctgtgagccaccatgcacagcttcattgtaccttaatatttgacagaaatacctacagtttgttctttaatatcaccttgaatatagatattgagattccattgaatctaaaaattgatttggggaaaactgatatattagcaataatgggctttctattttggccttatagcatttatcctattatataatcatttttaagtttttctttttgtgtagagaccttgcatatcttccttttcggtacctaggtatgagacattttggaagctatggcaaaggatatttgtttttgcatttcattgtctttttttttctgtgtatagtattctaggttggcatttattttctatattctaaagatttttttccatattaccctctgttttttattacatccactatcaatcttattgttgcttctttgaacaagaaatgattttcactgttagcatttaaaattctgtctttggggccgggcacggtggctcactcctgtaatcccagcactttgggaggccaaggcagggggatcacgaggtcaggagattgagaccatcctggctaacacggtgaaaccccgtctctactaaaaatacaaaaattagccgggtgtggtggcgggcacctgtagtccagctactcgggaggctgaggcaggagaatggcgtgaacccaggaggcggaggttacagtgagccgagatcacgccactgcactccagcctgggcgacagagcgagactctgcctcaaaaaaaaaaaaaaaaaaaaaaattctgtctttggatttcagtagttctattatggtgtagtattttagatgtagctttctttgtgtttaatctgtttgatgatcatagcaatttttgaatctacagcttgatgctttttgttatcttggaaaatcctagaaaactacttctttaaatatgcctttttctttatagtctctatcctccagttaaatatatattaaacatttgcagtatctgctctatatctctatgtcacttttccaatcatctatgtctattatgcttttttttttctagttttctctggatgttttctactgatctgtcttccagttcactaatcctttctttagctctaatattattaattccatatattgagacctattttcagttattacattttacagttctcaaatttctgttttgtaaaataaattctattctttgctcaaattcttcatcttcctttctgttttctcaaacatactagttgtagtactttaacaatacctatttcttttttttgaggcagagtcttgctatgttgctgaaggtggtcttgaatttctgggctcaagagatcctcccagttcagcttcctgagtatacaatacctattttaatatcaagcacaactgaagtttcatttttattgtctattttttctatttttttgttagtcttatttgtggatatttttcttatttgctgaaaacttttgattgaatgtttgatgttttatttaaaaattataactgtctagactatgcagttttgcctttctagagaggattcagtgtatcctctggtaatcagccaaaaggcagacagatcactccagttccattagaatatgacatggctagaagcttttctgaagcctgtgtgtatcagtctggtatggcctacccactttccttgggagttgtctttcaggatacccattcagagcctatgaatttatgagattttttttctttggtgggttctgaacttcaatttttgtaacctctgcactatgagactgttgcatacattcttgtgcttttcagaagatatttgcttggcttctttgcttcttaccatggataatttgaaaacttagtgcctcaaaaggaaaaccttaagtatcagggaacctcatttctctcttgttttgtgtaccctctgtccgtgatcttagcccctcaaatctgactgcctttaaaggcccaaactttaatgttttgtctctccagctctgtgaaaatgctggcagtctcacttttgttaactctgttgttttctgcctggattttcagcctcttacctatccaaggactatcatattatattacccaagggaaaatgttgctctcataatgtctgctcacctctcttactttatgtttctgcccaggatcttggcaactgaaagcttggctgtctctatggttatatcttcaaataggtgtttgttgcttttcgtttcatctcatattttctagttgttctcagtgggaacattgttttgtcacaagctattccatcatggtcagaagtggaagttgctaagtcaactaccttgataattattgtgccgttagtatggcttagtgactaagggaacacatttttgtttggataggcctttggtttaaattcctcttactatgtttgagataccgttccattgaaaacttagttttatcacctgtaatcagaaaaaaaaagacctttttttagaggactcttaggaggattaattggaaaatattcacctaaagtactgattacaataaccatcacatagtaaatttagtaaatatgtctcaaatgatacagaaaccttatggaacctgtaaggttaaatcatgcatttctgaaagtagtaataatatttactttacttccagtgggttaatatgaaccaaattatttgaagatatttctattaaatattgattacgtgaaagaatataacatatacttaagatctataacaataaatgaatgccagtgtaccgctactcaagttaaaaataaaatactaccagtcccattgagttttatgtatatgtattccttataaatatttcattgagtttttgcttttgaaatttatgtaattggaatgatgttctatgcacctctttgcaacttgcattattataacttgctttatcttaatatcatctctgtgattcattcatgttaactatagttttttttcattttctcttattttcaatgtggtgagattatgttgtataatatctcccaaatatgcatttattattaatagaaatggcgtgctttttgatctttcacttttggtcctttttccttggaattgtatttgggaattagttgaagatgaatttctctagagcagctttttgtttgcttgtgctccgcacctgtggacactataaatagagaccactttcaaaggtatttttggcttaagtctgctcgaaccacacagatagtgttacttcagaccacaactaggatgagagctttctcctgattatatcccaaggaggagatttctttcttccttttacccagagcaaatgttgagacaggcaaatttccttgcagtctccttctgtagatcagagttatttttctagtttgcccttatattgagaggacactatagatttgttctagcttaacttagggaactactattagactctttaagagagctctgggctctgttgcctgttaaactgtcaagttcaaagcccaggttcaccagctggagcaactgttccagggtgaatatgacttagtgttgaatactctctgaattatttcactttatttttgcacccctaggaatactttaccttcttaatagatctttatatgcagacacacatatgtttaaacatatggaagtacatatgtgtgcatgtatgtagataaatagatagatgcactttttcagaaagagtcttctaccgaactgttagaaacagaaatgtcttaagtctgatttgtgctgctgtgacagaatacctaaaactgggtacatgatgaaaaatagaaatctagttttcacagttctagagattgaaacgttcaagatcaagttgctggcaggtcaggagcctggtgagggccccgtctctgcttctaaggtggcgctttgaaggctgcgtcctctggaggggaggaatgttgctcctcacatggcagacggacagaagagcaaagagatagaacccatgatacatgaaagcccttttgtaaaggcattaaacccaccaatctgggcaaaggcttcatgacctaatcacctcttaaaggccccacctccccccatattcttacattggcaattagaattcaacatgagttttggaggggacattcaaactataccaagaaataactgattcagtttttataagaaattttagaactgtccctaagacctggtgagtttcaggcctcatgttctgagcctacatctgacatcagctaccatagtatccgctgtgcaggcagagcctcttcagtcataggtatggggtgaaacagatttccacctcttccctgagcttcgctggcacagaataaatgcattctaaagaaaactgatacgtcagagacatctgagcttactcttaattgctttcttacctttctctgtcttgggccagattttcttccaggctgatggcttcttccaactctgaattctagcactctctgctgtttcattttgtattccatgccttcgtctcttctctgatcccttccatctgcctgaaagcacttcctttttattatttctgtgtcctataataataaagttaacaaaagtgttaagtatatgtttatttttccaaggttacataggcacatgtataatgtagggaaactggctgacaatcagagacagaagacacatacacgtgggcccacacacattcgttcactgttgtccttaatgcagtattcaacattacaaattactgtaatcttaataaaactgcgacattgttttccttgtttatttagggagcacctttaaaaatcatgtatttgctgatttattcattcactattgtccttaatgtagtattcaacattccaaattcctgtaatcttaataaaactgtgacatagtttccttgtttctttatttagggagcatctataaaactcattatttactcctcagaaaacttgcatgggcatatagttatgaaccagtttgaatattatgattttatattcacaatatttttatacttatgatcctaggctaaggatatttatattagaatgttcgctgaggacttaaataagttctcactgatacttacactgaatattatctcaatgtacttgagagaaaaggtattgcaagtaaaggtaaatatatgagtacatcaattgtataatttaattttctcacaattttaggacaattttgtataggatctataatcatatacttttttaaatattcacttgcttttattaaatcaatcacaagaaaatacagaacgttttccccttccacttctgaagtggaggaaatcacttcaaattcatgggatctttgaactttgcccattgggccagacttgcagtatcataaacttctttttcctacctatgtatgattttgccatgtgcgaaacaatcattgctagtaccacgagtgagtgatgataagcttagaatacatccagctaagatcagtgccatttgaagctccctcaatatcgcatttcttcggttctttaaaaaaaattcattgttttggagtcagcatattattaatgaatggagtatttgaggggaataaatatgactttggcaatatcacatgcatgggaaaaattggctagagaaagggctaagtctttcattctgtgttttagagaacagctttagctcgtatgaaaaaattctggcatagatatgtgagggggagtgttggataagaaaaggaaagagaaaaagcttgctgtggagtggaattctcatcacatttctttcttacctactactctggggaaacttcagttacagggctgataaatatttattaagaatatatagacagtataacctaaaaacattggaagatattttagcgaggcttgagtcagattaaatctaccaaccgctaaaagatggctttgcctagagaaattcttttttctttgggagcagctattagggaaaagcctattgcctaatatcttaattgaaacctatgcataaaattcaattaaaaatggcctatattttgaattgtttttcaagttacagaagaactttaagatctttgtaggtaatttctaaaaagcataaatatcttaaaatatatatctgtactatcaccattaaaacttaccattctttgctctatattttccaaagctatattcagagaaaataaaacctattatttcatagcctgctttaaaaatatctcttaaaatacgctatttttcatctcctgatctatccctcaagaatatgattttaaaactgcattacctcatttcgacttatttgttttatgtcctccttgttattaactatttttaattttttctgtgtaaaaacacttatttctttacatattttctctaaatttggaagctatgccttcgtcaatgataccatgttaacattttaaatttttaaaaatattttaatatattttattcaaacagtcccaataattaaatttatttcactggcaaatgcgatataaaccaattgctgcatctctcctctccaaaaagcatgtcttgttctagtgatgtatttggagatagaagacttaaattattttatttttttttactttttaaaaatgagaaatgaaaactcggctatatgcatggtgtacactgtgacgttttgattgaagtacattgtggaatgattaaatcaaactgattagcacattatcatctcacatacttatcattttttgtgatgagaatgtttgaaatctactctattattatttaccatagtcaccatgagtatattacatcttcagaaattatcccttctgtctaattgaaactgtaccctgtacacaacatctccccgttgaccaccccaccagtccccgagcccctggtatccaccattctactctctgcttctatcatttgatttttttaaatttctacatttaagcgtgatcatgcatatttgtctttttgtgcctggcttatattgctaagcataatgccctttagttttattcatctttttgcaaatggccggatttccttcttttttatggttgaacaaagtaccttttttccccccactgtcccaaatatatgggctcaacccccaaattggcaggtctaagaagtctttccaaagggtagtctattacatttaatttctaaacataagttgaagaaaagaaaatttatcctgacagttccaaagttcaataaaaagtatagtttttgagtttttacttcagtaaggtattattttagtttcttagcttttcagaaagtctcagtcttttcaatgggaaactctcttagggcatttaaaatataatttgctaacaatgaacttttagatgagtaatcgtggctgctatcactggccctggatggcagtgggatgagcttgcaatgccaaggatacagctgagcaaatgccactggaagctaaataacatgaaagaaaccagggttttgttgtttacaatggccatgtgatggtatgagtacaggaaagggctagaacctgggcatctgaggagaaaaagcattgacagcatggatgtaaatgacgactggtatttgaatgcaatgtggggccagaggtagacatcatggaaaagtatcagactttgcatacaggacacaaactaaagtaatcactagggttagaagaggagcccactttctggagataggttactcagagcaagaaatgcagcaagtcagaaagctgtcgatttgggaagctacttattaatgtaccttacatcctccctgacaacaatcgagattgataaccacatttaattcagttctagtcagtaagacggaggttttctagcaccagctgccaagattaaaaaatgtgcatgtcctagctctgggaagtgtctggtatgattgatgcttggtacttgttcatctaaatatgaatttactactgggaaagaaattaaacttctagatattcatttggtagatcggtgaggtgactgaagtgtggcaaacctcacaatgattatgaataaactttattaagaaaaactgaggcaattaacttatttgttcttcaaaactgaggaaatatttgtcctcacatatatgatagaatattgtttgctgctggtaaccaatctttgctttcttctactaacaacttgtttgtcaatatgtcttatttctcactctaataagactatgtctaaataacttctctcctaagggttaaaaatacaaagaattttcacacataaccaagtaataaagaatgtatattattgaatgaatgagtaatttacaaaagaaagtgttgagaagtagaatacataatttcagatttatgaaatatgaaatttcagattcaggatctgtccagtggagttgtgtttttacttttatggggattaagtcaaaggcagtatattaaatataatggaataatattcccccaaaacatggtaaatctatactttccctgaatataaattttcctttaggacaccaaatctttaattaggttaattataatttcaggtagattaaagaggactatttctctttaaacataaggataattatatgagaattaaatctgtgagaaagaattggaacctgaaaaagacaatggagaaaactagcagacggtatgttcaactagaagaaagagaatttaaaagttaaacccaaggtggtgaataatcacaaaaattgttaatgaagagcacttttttttttttgctgatgttctttaaagttttttagccctggtaatacatatttagaattattttagaatttgattatctatgactgtaccaatattattgtgttagcagtatgagtcttgctttctattattgaaatcgttgttaacagatcaaattacccattatagttttatgctctgtgcatacagtggcatgacttagattagaagaggtggataatgttgttctcatattgatattataagcttttatcacagatctagggacctttgtcttctaattcttgtgtgtttattattgcttattccattcaattggcatgtaattgaaatggaattgaagacaagtacacatgtgtgttcctttatggcccctaacattcactgtttagttatataggtctagattatgaatggtgcctagaaaaaaaagtatgaataaggaataattaataatgaatacttatttccatcacctgttaacatactctgtccatttattcctcattttaccgtctacatttaagttctcttttctagccaccaagcattattgtctagctaccatctactgagtgtttaatatatgtccagaattgagcagagtgctttgtatgtaattcatataaccaatctagcaaacatccttgatttttcattttacctagttgcctaaaccttccagcaatctattaggaagtcaaaaagcttctcttcctctgaaatatattccaaatccatccatttcacctgttattcttctaggctaagctgtcatcatcctttgctctggtgattgcaatagaacctaattgtcctatctttttcttgctttacacccttaaaatctaatctacttcttgaaatcagggtgtgtttcattgtaaatgagataatatcatttctacatcttaacctagcagtgacttctttccatcatatctggactaaaatccaaactctgtatggatgataagacctatcagaattggagtacgtttttttcatccccatcacatgccatgcccgttcttttcaaaaggctacggctctttcttgtctaacatgtaagcacattcttttcaaagagcctggaatgttcttccctagatgggcatgactggctcttttttgtggaggtcccagctaccaattccttaagggaatctacccttccttatctgttctaaagtagccacccagtttctatcatgaccctcagtttattgtcatcaacacttcattttcttcatttattgtttattccttaattgattctacttctttagtagaaattccagaagctttaaagtgttttgttcatagctgaatgcccagaacctagactaatttttgacattcaaaaaatagcttataagcatttagtacattttattaaataagaaaatagtatctcctctaatctcagaatattataaatttatattgttattatcacttaatagatttaaaaagtcatgaatgtgggagataagcccagggttatccagttatttcagtggcagagtcagaatttgagctcatgtgtttcagaccttagaactttacctatagtctttgatgtctacatcacattatgctccctcccatgtaccaaattattctcttaacttactatatcaactaatatatctataaaataatctctggcataggaatatagcattcatataataaatcattactgtaatgcgttgacaatgcattacagtaaataatgcattacttaacctgatacattattcagctgtttagatgagtcatcaacctaaaaatatctgactggctgtacagtaatgtggtaatacattcatcatagagaaattaacgtatgggttgaatattcatagtgatatgaatacaaatatgtgtatcagtaggattatggatgtatgatagtttagtatttacctagcatgtcaatggatgataacaattatctgcaaatatttctgagtgttttaatttgggtttccctagaagtagactttgagacagggaattgaggcaaggagtctatctgggaggcaatcccagggcactttggcaggaaaatggtaaaatgagacaggatgggagaggacccaataaatggtatgttatcaagcgagctatcgttatgggtatctggagtttaattctacaggggactctatgaaacagtgtagaacacacaactcagacttatcctgaccaagatgcaagggagctgggtatttatacaaaaagtcttgttaaactttggcttagggctgctctggggagcataattacttgtctcctgtctgctgtaagtgggcagcatgggttctggcagtaagagcaaaaactcagggaataaagtggagatgataacagttgaaagttggactggtatctactgaaatactgagaccatggacagctcgcaggctattaacaaggtcttctaaactactcatatatgcatggtaatctgcatgcatttctgaatgtatacatctatacgaattggaaccaacagatgaaagtaactacatgaaaactgtgaaatatagaaattacttacctgtaataggacagatagaatatacagacaatgctcttaagttcatgggtttctatttgaatgtatatgttggtgcagaccctgtgacaatctgtattttcaggaattgtaggtatatttgagaaagttatatttttatgtaatatataacagttctctttaggacttatcagtggatatcctaagaaacttttaaatattttcctatgtttattcatcccacttcacactggtatagatagatagttttttgataactcaaatctacctgtggtaagcagaataatggcccccaaagatgtccacaacctactccctggaacctgtggacttgttacctacatggcagaaggggttttgcaggtgtggttaaattaaggatcttgagatggaaagattatgatcctggattatctacatggttccagtgtctttacaggctctttataagtgaaagagagaggatgtggagtcagattcagaatggtgtgatgtgaaaaagactcatctggtcattgatggctttgaatgtggaaggaagccatgagccaaggagagcatggagcttctagaagctagaaaagggaagaaagtgtattcttctccagagccccttacaggctttgccagacaccttgatcgtagcccagtgaaaaccattttggacatttcacctgcaaagctgtaaaaaaaaatgcatttctaatgttttaagcaactaaacttgtagtactttacaccagcagcaatgagaaactaatgagctacctaataaacacagaggtaaagtcacctcaagtaaaaaaaaaaaaaacaagttaagacctatgttttaaaggtcatagcagtatttccactgtccgtatgtcactgcagtgataaatgctgtgttttgaccattgaaagaattcgaaattcgagtaagcaaaactaagttggaattctgcctaattactctctatttaacctcagataacttttaatttctctttgctttatgttcatcatctggaatatggttacagtaataatattctgacttccctcatgagttcattgtaagtattaatttgaataacctaggcgaaaggacgttgtagtctgcaacatagtacatgcaattttatttggctttgttagcaaataatagtgctaaaagaaatcagatatccaaaagacataaattaaaccacataatcctagtcaatttgtagatttctgagtatttctgtatcaaactggcaagtatatgctatatttatgatgagtaagtcataacagttaaaagattgactattaattgagagtaaaaattgtccttgttattgtcttatgcattttaatttgcattttctgtgccttaaatagaaatattttaaaacaattcatgtatgcaggaataaaagcactttagtggactattaaatggtaaacttctccacatcattcatgagggaggagttataaaactgttctaactctcaatttcctaaaactttggtaaaataatattctatctcatattctcccttctgtatgtctttatgtttgcaaagattctttggggcacagaaataaacaaatcatccctatgaaagggtcatcgtagctgccagtgaccaaaagagctgcctgctgagcagtttcatactgttactccagctgccatggactcatgcgtgaggaattcacacagctaatcaattccataaggtgcagttgctggcttctctcttcttaagcctgtacataaggaattggcacttgagtgtttcatcctgtggactctacatcattccttcacaccctctgccatttcctggccctccccaaaatagacccaaagcaaaacaataataaacaatttgctgtttgatttttagtcagcactaccattcaccagcccttaagaatgccacagcagctgcctgtcactgactgtttcagcaggatcaggctagaggtaggagaggcggggcaaaatttctcctccttgtaggttttagttaattgctgtcaatgacaactagcagttgtgcacctgtttccatgcatttagtttctaccctccatcaataaattctaacaattatttattgaacatattctatagttttggtccttaaaataacatctgattataggtactgttgttatcaaatgaggaagcagacttcacaaatagcaactgggccacaaatcttgctaccaagtgtcctagccagtggtcttggaagtctaggctctttccctatagcccccctgattttattagccaagttctaattctaacatgggaaagtcctatttcttagttatgtgtgatgtaacttagatttgtgtgtaagttattatttcttagttttgtgtgatataacttacattatcatgtacatgtgcacatttacatcttacatgggaaattttaatcagaggatgtcttcatctttgcgtcactactgaattgactaaagactcactcaaagacatttccgttttaatagtgaagagaaggaagtgattctctttgcatcttatcccttcatcctacaggcattgtgctcctactgaacactgaagagtagttttgttggcagtaaccttagaacgtttggagtcaaaagttgttgtctctattacactcagattgtagaaagtcagcaggccattcggagtgccaatatgagctatgtaaaagtcatctcaagactggaggaagagtgactcttgaggcctttattttccatataaattgtgccctctgtttcctagcacctttcaggatccggggcagcctgtctgccattttccacttgtttagggctttaaaatcgtaaagaacttcattaactccatgaaggccttcaatttaatattgaggatactggagtatttatcacagaaaagatacagctcaaaaattttaacgcaatttcatggaaaattaaaaaaataactattacattttggtaagacttgtatactgaatttttcagaatgtaagctaaattgggtttaatcttatattttataaaaacaaagaaatatgaaatttatccatttattttttttttctttatgacatattccaaatatacagaggaggacagagacctaaaagcctcagggacccatggtggggctctatcaaattctttcattttgccttatgtttccagatattgttatgagaaaaaaacttacaggtaaattgaagacccccatataagccttcagaaatctcattccccttcctccaccaagttaaccaatattctgaatttagtatttatatttttatgctttttttttacgtttacacatatcattgatctatccaactttttgtaaattatgttgtgctgaacatacattcttcaacatgttattttctgtttttgtttatgttttattttagggattaagccttgttgatgcctatagctttaatatatatgtagaaatctgttgtatgacccatgggttagcaattctctggtaaaggatattccattttcttcaaacattttgctgctgcaattagtactgtagtgaacattttgatgtttccttataaaaagaatggtggtctttttagtttgtaggaattctttgatcattctattaatcctttgtcaattatgtggttgaaatgccttgaattttcaaatttatttgtatgaaaatactgacagtagtcccttatgatttttgccatccattctataaagagctattcgcgtttcaattctaaaattctttgtaagttttctctttcattcttggaagactgtttgtttactctttagtctcttcaaagaattttgtttggttttttggctctctctatttctgtgtttatatttcactattttatactgttgctttgattaaatccttccttttagattgtttaagtacattttcattctttttctaacttcttgagttgaattaccttaaatttattattctcagtcttatagtttttaataaatgtatttcatttattaaataaatgtatccatttctcttttaacttcttcccacaagtttggaaaagtattccttttattgtaaagttctggttctctttcttttttttctttttgtcctattgggatttcctgttataacccatgggctactgaagttttcaaacgtatagaaattttttgcagaaagtttttgcagtatctattaattaacgatttctattgtaacatcatggtaaaaaaacattggttctgtaagataccaattctttgaaattgtttgtgatcttttggaacccagctggtggtcagttttcataaatagtttttgtgtatctgaaaaagatgtcaatccagacaggattttatatgtatacctatgagaagaaacttgttaaatttatgttagatcttttctattttactaaattcctgcttcccctgaagggtttaggtatgcaagtcctttagaaatctaaaggtagtaatgttaggtttataattgaaatggcttctcagtggactctacgtcttttactgtattgtgaaccctttgatgcattgttttacatttttttcttactggcattagtattactacatatataaatttttttcaagttagtatctatatagtatattttcttcagtctctattttaaactttcaaaacaaatatagttttgttttaggttattcttgtaatcatcatgtagttttataaaaatctaatttgattatcactaatatgtgagtttgataaatccacatagtcataattactgatatgtcacaacacagtaagggctgtggtcttcatttatctgaacaactgctttacatttagtttcagagatcggagtaataatgaacctttctgcatgtacccagtgttatgactcctgtaaggattaatttaaaaatgttcaatatttattttccttttggattttgctgaaaatttaattttagaaataaaaaaaatctctagttctttcaaattttccatgaattgaagattgtttaccgatctatttttttaatactgcattttggcataattttttaataaatgtttacactgtaattttcagtaattcagtgtaaagctaacaggtttttttcaaagatgaagagacacaatatgttatagaatatagtacatggtgggacagttaagtaggggttctggagtttatttttgcttctgctacttaactatgttattacaaagaaaaaaatcatgtaagagactccgccaaattctcttctgtataacaagagggagtgacatactatctcaatttcagttttcatatttaatgactcacaattggatttttggtatatatttgaccactttctaagattttattttttatgttcttgaaaattttatattctataaatatttttgtatacatatgtacctcacattcaaggtaagaaattcttaagtaattgaactttgtggctataattaaatatatacactaatagatgacagaataaagaaaatatttttattctgagagcctaattttaggtaatgaaaatcattttatgggtaaataaagtacacattttatagtgtgctaaaaaatacacaaaatttgacatttaaaacaataaaaaatattaaataacttggaatgaaaggagcatatcgaagtatttgtgaataaataatctcaaattgattttttccaacactataacatctcttttctgtttaaaagaagtttaatagttggttcaatcttttctttgagtttgttttttatattttccaagcttttaattgtcagtggagggagaggacttgagtgtttttaaggtttccatcaacatccattctcctgtattcattgttaggccaaaaggactcaacatctttgagtcttccctatttgagaccaagtctatactcagcttctaatttcagctctagcttccattcactctcagtctttgttagcattatctaagtttaggttgagattattgcattattgacttgcattataaacttcttctttcaagaataatatgaccttttaatcttgttatatatgtttacccatcatttacataaatttttattttatattccatatggttttattccaacagtcttttgtagttaaatattttatactcattcatcataaatcttcaagtaatttttagaagaattttgtaaaagtatatgacttttttaaattttgtgggtagactatatcaataaaatatttaaatatattcagaaacttcttttaaagttcatatcactttactttggtaaagagttttagcaaaagcttataattaaaatatgcgacagtgctcacagagcatttctgattactatcagaaataggggtttattctggaaagttgttttcctgaaagtcttaattgtaaaaagtgcagtttaatacctattatattcttatgtgtatattaatgccaaattaagcaatcttcctccctttctttcttccttctttcctttcctctttccttcttttcttcgtttctatatttatgctgtatacgtactacttgaaatatccagacactactatttgtttaattcacaagccatatctggtgatatggatattattgttcttgtttcatagttgaagaaactgaaactttaatgaggttggataagagccacaagtatagcagattttatagtgtataaccctgcaaagctcaaatttggattgatatctctgtttattctagaaccctcctctgtgtcattctatgtcagtttgctttgttgtttattatggtaaagtaatcattcttcacttcaacagttatctgtgagttgattctaaaacatagaaaaattttgttttaaaataaattgtatgtatgtcgtcacctaataatgggcctatgtggggtccacacaaaaccagtttgctgcagtcttggcatagtgtaaaattcccaaagtttttatatacatattgaatgcctcaaggtatattttaaaagcccttgctaatcccaaaggaattgttctaaaaatttgtttaaatgaaatttttatatattttaatatttaaattttaaataatatttttaaaaatcttaggctgaactttcagtttgtaattagcaaagtaattattatttgccccaagccagcttcctcctatttcctgaccctcatttgtcttccctccttataagatgcttaatgaaagagaacttgatttttgttcatttgtttttgagacagggtctggctctgttgcccaggatagagtgcagtggcacaattgtagctcactgcagccttgaacctgggctcaagggatcctcctgcctcagtgtcctgagtagctgggactacaagctcatggctaatgagcctggctaatttttaaattttttgtagagatgggggtctcgctgtattgcccaggatggtcttgaactcctaggctcaagcagtcctccagcttggcctcccaaagtactgggattgcaggtgtgaggaccacgcccagccttgaaacttgattgttatttacatggtgcacttaagaagcctaatcttaccttctgacccagggtttgcagtcacagtccttagagtttttgaataaagactgtgctatttcttttttttaaaagggatttgtttttatctaatttatttctgcctttatgtttactcattattaattattcaaaataagattgggatcatcatttatgtatgaataactcaaattagtttattgtaatacatagtcctggtgaagaagaacatattcagttcatgccttcaatttgcatttatcttgattagtgtttaagtgcatctcatttccctatgcttctgttttcatagcttatataactacactgttagattttatgcatgatgtaacaggatacaatcccatgatatatttccatgatgtcaaagctttgaattatgtaaataggaaacatgaagcaaaagcatactacttattcattatgcattgctatgcggcagacgcacagtcaagtgatgctatttaatctccctatctgcatattcttaaagtgcatatctctgtgatatcgaagcactcaagcaatgagtaaatttctgcatctggttaataaattcagcaaacaggagttcatcaacatctggcatctgccttattttactggctttatatgaataactgatggatggcgacctttgataaatttagtggttgcttggaattttagtaggggtttgatattgtttgtgtgctattgtgaatttaatatggcaatcaactttctcttggttgctttactcatactagaaaccacagcatcaaccaatcaaaaggctgtttagcatttggtgttatcacatataccctaatttgcacaactttccaaaatgtaagtaccaagagagaagacacatcaataaaatataggaattataaggaagaggaagaggtttttaaaagtatattattattcagcaaataatggaaactggtgctcacaaactactaaattaagagggcttttttcctttaaaaattaatgcaatgatagtgcagaacaccaaataaaaactgcatagccaaggctctggaaggttgctggtggctcctggacatcagtgggatttcacatctttctctctgacatatcatttgttcatttccagagaatgcccagctctgtgttttcttaaaaataagtttagaattctcataaaggtggacattattggcctagcatgagttaattttctctacccctggacctggaccaatcatatatataagcagagagcagaaaggtagcacagactgaggcaaggtgaggataaggtattttttgtgtgtcacagagacaccttgcttgtctcatttttgaaaatgatgaaaacaaatggtgactaataaatagaaaatgctctgtggtattatcttctagtactaatgttttcttcactgtccctggcctggtatctttcttggcatacctcacaaattacttgacttctgttttatgttgacttcactcctttacattacattattgggaagccctaggtcttagaaaactatttcttaaactgaattaaaattttgcccttgtacactggtactggctctgtcctctcagtaatagaaaagaagtcttccatatgtccacagccattatttgcaaaaagatatctctttcttcaggcttatgtttcccatgctacatctctcttgttctctgaaccacactttatacagcctgactttccatattctcactgttgctgtcatccccatctgatcattcccctctgtcttaaaatgtgacaattacaactggacataatactccatctgtgatcttctcaggacagacccaagcaggtcccagtatagtgttagcaggacatcacatttttggcttcagatgaacctgtaaatacctaaagtacctggacttttcccatgaattgttggtaggccaggatgtgtgccccattagttggggacactttctagtgacagttcctggaactctatctggctatttctctagtcaggcagtgaaggcagataaatcctcggttcctggcaggttcaggtggaacacgcagcacagtgtgcgctgttgaatgagtgttcccgagatctaatcacatggaatgcctgattgtcaaatgatgaacaaataattcaggagatggacctgggagttgaaaatttttttaacaaaaaagaaattacatatatgcatttttaacaaaagttttataatcattgatatagtgatggtagcaccagtagatattcaggcaagtaattatcaactggatgacttataaaggaattgataaagcctcccaagggattcaagaaaagggtaaagcttggaagtccctaaggataagtggctgagatgtttgattcaggacttcctgtccttgaaaccttggtcagttactagcacgtaggacagtctctattgtggaccagtaaaaagctggttgtctggagaattcagacagaaaaggtaaggctgggacccagttatcaaggctgcactacaactagggcttgtaaaagttaggggattttggaattagcgtagaaataatgtaatatggtgtaagtaacacaggctttgtaattagtgcaaaaatcataagcatatgggcttgagtcagtcttctctttcctacttactggctgcataccttttgtcagctatttaacctctctctaagcctcagcttcttcatttataaaacaaattaatattatctacactgaagtattataggagagatgataatgtattttttaaaaactagcacagaccctggtcaacaataataaacatactaataattgttactattataataaacgtgttgatatctttttcttcatcaatgactttataaaaatattgggatggagatgccaaaatctcctctgctaaatgccatctttcatcctaaggctatacaggaacaggccttgcctactgaactttgtagctataggcctactacattgcctcccacttgaaccctcggttataaacggaatggagagttacttttccattcagaaaagaaccttgatatttcagaaggaaaagttagccctggacacttgagcatttctaagaaaataggttttttttttctttttaaattgtgtacctgctgccctgaattctctagatgttctgagcactctgtatattcttactcatagcttagtaataaattatgtttataaattggagactggtattgtataatttagttcattgaaataatttgatctggtgacttcatagccagacagagtcaatggattcatataaatgagaatccagggttaatcaccatcaaacattttcaacataaagtgacatttttttccttagaatgggatttttactacattcaaattttactaatgctgtaaacatgaaaattttgagtcaggtaatgaatttgagaatggatagctaatctttaaaaatctagtaacaaatgtttctgggaattgtggctattgttcccttttggaatgatgaccaacatttttggaaatgaaaatattgataaatttgtgtggacttaaatatggagtccacacaagattggggtcataggacagaaacaatatttgtttcacatttacattgctgaggtattatgaagaggttagaaaggtgatttttatttagcttgcagaataaatattttaaaatcacagaataacatatactattaaatgcctacatacatttatatccatatgaataaaacagtagaagctgaaatataaaataacatgccactgctgctggagagatttaagccaattatctgctatcctggagcatcagacatatatatctatatctatctataatattatatatttcataatttatatatttatatatcggtataatatattgttttatacagattatattattatatgctgtttttcaccaatgttgtttacatatattatacattatttatatccggtgactacataattgtgcatggtacatcccgtctctagtcagttgtcatgacaagagttttaatcatttatgcttactttatgattctattgtacaatttttattggacattatttcagtttttattaattaacagggcatatcaaatacctccatacacactttattacagatttttttgtcccaaatatttttagcatttttttaaatatgaaaatagatagtttggaaacaagcttctatcatctactatttcttcagttatttgaatgcagatggcctatcacaggacacaagaagttgagaatgtgctaggagaattgccagcactgctcaatacaggtgtttgcccaggtctaccttttgactctctcacttgatctgttcttgtgcttctcactttcctgggcagccagtcccttactgagtatttctggccttcagtatctgcttcttccggttcctttgatgcagcacccacttgggctcgcttctgtagttcgctaaactcagttgcttatcattgtaatatttccgtaatatcagaatgactactgtctcaacttaggagacatccacttgtcttctccagcacctgactgagttcttgccatataaatttttgttgaataaattcaatgtttggcttttcacatcatcataaacaagacttacaccaacaatcatgggggaatttgaataaaattaagattaggtctgacttttgcaattttacaacttacaagttagtgttaagaaaatgtataaagatggtgatatgccattttgaaacatattaagcattttcatctttagaacagccttcaagagagttattatgaaacacatttaagcttaagaaagctgagaatcagaatgataattaataattatttgagggtggatgaaaaagtaaagaacatttacacagttttagtgagaatgtaaattagttcaatcctaaggaaaacaatatgaaaatttctcaaagaactaaaaatagaactacagtttgacccagcaaccccattactggtatgcgggtggtactatataagaggaaaagaaacatcctgtcaaacagacatctgcactcatgtttatcgcagcactatttttaatagcaaagtcatggaatcagcctaagttcctatcagcgggggactggatacagaaaatgtggtacatacacaccatggaatactatgcgtccgtaaaaggatgaaatgatgtgctttgcagcaacatggactctgctggaggccgttttcctaagtgaattaacacagaaacagaaaatcaaatacttcatgttctcacttatacgggagctaaacagtggtcatgtaagcacataaagatggaaacagtagacactggggactccaaaatggggggaaagagggaggagaacaagggttgtagaagccaaattgaagcctgaaacaatacacctttgtaacccacctgcacatgtggcccctgaatctaaaataaatcaaacaaaaaattaacaagcaaacaaaaaacagaggaactagggtttgaattaatatttctgatctgcatatcgctattttcctcttaaattatgtgcttaaatacatgaagaaggaggaggagaaaaaaacaacttaattaggagacttactttaataatgtatcatttataacttttcttccaaaatctggttacatgtcaagaaactgtataatgtgaatctctctagttcacctttcctttcctttatgtagatcttggttgcaattcagattttcttttttctaatgaacagtacaatcagtaacagttgcaccaaacatttcaatttgcaatatacatgtaatggtttttcaagtgaaggttacattttatctttttttattatccatagaataatgtgttttaggatgaaagagacactgtgtgtgtgtactccgtttaaaattaagatctgacggtctgagacatcacatacaaagcataattcagtagctatctgacagtttcccaattgctatgacactaaaaataaaccaaaccagataaatcaaccccctaagtggactctctggcctgaaatgttcgggttttaatgtgcctgtggaatgttccaatataattttcatcaatgttgattgtccagctcacacagccctgggcactagagtgattgacataaaccccgtcattattccaacaattaaatcagcaggaattagcacaaacatttttttcctgttccgtacactaaaaatgtttccatgctgcaatgttaggatttaaatgtaacaaacataatcttccctgtgttgtataactttccgatctactaagaaagcctaccaaaatggagcatttggtttaaaaataaatacctggactcttccatgtggcaacaaacaatacataagagatattggacaatgaacaattaattacattgataaaaataattgatgaattaagaatgtaaatctaaagatactttatattcctctttttggtttaactttcaaatccagaaagctcttaacctggttaactaatcgatgataacgttatacaacaaacttttgttgagtacttgctattcattccttgaacgttatttattgtaataaacgtgttaattgaggttctacatatataaaactgtttaaggtgcaatgaaacaaaaatcacctgaacttcggacaaatgtgatttttgtctttgcttaggacgtttttggaatatttacttttgaaaatgtctccatgacctgtggcagtgttttcttctgaatagtataaatgacgatggcaaatctaaaataagttatttggagccacatctagaaaataatgtgagtattccagttattagggaaggctagatttgatcaaatatatatatagttatatgtattctctctctatatatagaatatatagttacatatgttctatatatagttatatatactctctatatatagaatatatagttatatatactctctatatatagaatatatagttatatatactctatatactctatatagaatatatatataactatatatagaatatatataactatatataaatatatagttatatataactatatatagaatatatataactatatataaatatatagttatatatatttatttataaatatagttatatatactctatatagatatatactctatatagagaatatatagttatatatattctatatatatattctatatatagttatatattctatatatagatatatattctatatatagaatatatagttatatatagttatatatattctatatatataacttctatatatagttatatattctatatatagaatatatatatagaatatatgtatagaatatatagaatatataatatatagttatatatattctatatatcgaatagttatatatattcgatatatcgaatatatagttatatatattcgatatatcgaatatatagttatatatattcgatatatcgaatatatagttatatatattctatagccataatgcctattagcctggcatttagacttgcaagtgtcaacttattacttaccttgttttattttatttctttaatgatctcaaaaccttcctctctcgatttcaatctgtggtttgttcccaccatttgccgaggtctagcatcttattctttgattttcttttttcttttcttcaacttttaagttcaggggttcatgtgcaggatgtgtaggtttgttacgtaggtaaatgtgtgccatggtggtttgctgcacagatcatcctatcacataggtattaaacccagcatccattaactattcttccgatgcgttccctaccctcatacgctccccccacaacaggccccagtgtgtgttgttccctcccatgtgtgcatgtgttctcatcattcagctcccacttataagtgagaacatgcagtgtttgcttttctgctcctgcattagtttgctcaggatgatggcttccagctccatccatgtccctacaaaggacatgatctcgttcctttttatggctacatagttttccatagtgtatatgtaccacattctctttatccagtctatcattgatgggcaatgattttgtaatataatgatttatattcctttgggtatatacccagtaatgggattgcagggtcaagtggtatttctgcctctaggtatttggggaatcaccacactgtctttcagaatggttaaactaattaatactcccacaaacagtgtaaagggttcctttttctccacaacaccaccagcatgtgttgttttttgacttcttaataatagccattctgattggaataagatggtatctcattgtggttttgattttgcatttctctaatgatcagtgatattgagcttttatttcatatgtttgtcagctgcatgtatgtcttcttttgagaggcagaaataccattcgaccctgcaatcccattactgggtatatacccaaaggaatataaatcattatattataaaatcattgcccatcaatgatagactggataaagagtctctgttcatgttctttgcccactttttaatgggatttttttttcttgtaaatttaagttccttgtagactctggatattagacttttgtcagatggatagattgcagaagttttctcccattctgtaggttgtctgttaactccgatgatagtttcttttgctgtgaagaagctctttagtttaattagatcccattcgtcaatctttgcttttgttgcaatcgcttttggcgtcttcgtcatgaaatctttgcctatgcctgtgtcctcaatggtattgcctagattatcttctaggatttttgtagttttgagttttacatttaaatctttaatccatcttgagttaatttttgcatatgatgtaaggaaagggtcaagtttcaattttctgcatgtggctagccagttctcccagcaccatttattaaatagggagtcctttctctattgtttatttttgtcaggtttgtcaaaagtcagatggttgtaggtgtgtggctttattcctgggttctctgttctgttccattggtctatgtgtctcttcttgtaccagtatcctgctgttttggttactgttgacttgtagtatagtttgaaatcaggtagtgtgatgcctccagctttgtgctttttgcttaggattgtcttggctatctgggctcttttttgattccatatgaattttttaaaagtttttctaatgctgtgaagaataccaatggtagtttaatggaaatagcattgaatctatcaattactttgggcagtatggccattttcatgatattgattcttcctatccatgagcatgaaatgcttttccatttgcttgtgtcctctctgaattttttatcagtggtttgtacttctccttgaagaggtctttcacttcccttgttagctgtattagcatcttattctttcaagaggacagtttgttcagtttgtttaaattattatcaccatcacaaccattaaacctttattcagcaactgaagaatgtaccacaatatctctcatttgcaagacatattctgttcatcttctgctttctgcttctgtagcttataaagatatataaatatattttaaacccaatttgtaattatatatgatgggaattgaaaacgtgggtgattttcaaataatcactaaggaataaaatatgctaaaaataaattgtgaagaattgatatgattttctaaggatggctttactggagaaaagcagttatcctacaatagttaatatataactatttttatgattattctgttcagaatctgaatttatattattatttggggccttttttaatcaagtgaagaaaggtatattttcttttcaaactttttattttgaacattcataaattacatgaacactaaaagacataaattatctttcaggaaacattgaataaattctggattcgtctatattttattgatttgtaaaacatctcaaatttaacatagaaatgttaaaaagagattatattataacgtttgttggaaaatatgctatatttataatatttattctgtatttatatattataaatatattctatatttatatattataaacatattctatatatattataaacatattctatatttattaacatttaacattaatgttaataaatatagaatatttttcaacaaactttataatataattccctccttcaatgaactaatttttatggtggtttacatttctttttcaatgttggtttacatttgacgttaggatgtttattagttaatacaataaagtgggtggtcttttcattaatattatcagtcaggtttgtaaatagtgtatgttttgtataaccacttaaaatttatatactgatatatattttgtttaagaatacttaaaataaaaacattagttatcatttgttgaactggaaggatcattacttaaaaatccatccttaaaattaaaatgacttatgcttcactgtgtagtgcattgataaatatttagtctatagttttttctattgctatgtgtttagccaagaattgtttttaatttggtgaacagtaccttattaggaatatgaaaatttttgaagcagtcatgaaatatttaacaattaattatttaacaaacaattatgcaaaattaattttactaaagaaatatttttaaatcactgcaagaaatattttcattcaaatgagtacttacaaccaagaaagagtcttttattttttaaatgtgtataaatttaaacttcaaaatacttaaatcacttaatgcctcagagaaaatatcttaatacttatgaagtgttacgtgtactaagcattatgttaaattctataaagacatctttttaaatcatcacaagaaattacaaggcaggtgcatctattatattttttatagtagaactaattgaggcacagtgagaggaaatgatgtactcaagttccacaggtgataagtggtacagctgagtaaaattccaagtctaaaagctagtctcttaactattatatatcggcctatatgcataggccgacaagtagttatttaaagttatataaatcaagagaaaacactacaaaatttacctataggatatttatacaaaatatgggcattttattaggaaagctttctagaaatatgggggaactttaagaaacagtgaaattcaaagctatcattgtccaaaagcatgtggtcttctgtttttgcactagtgacttaggtgcaaattacttccaagatttttctcctaattgagaagtactttttaggtctagattccatggaggaggtgggtcttcgaggtggggcttcaaggtggagatagtgtcttttttctagcatgtaatgaggtaaatttgcttttgaatgaacaggtgcacctatttcaattaaggcaaattagtttccaaaggctttgctatttaagatattatagaaggctatttaaatgtgccaatttacataaaatacattttgaaagattacaggaaacaattttatataattcactgaaacaatttcacagtcctctcaaatgatgattttgaaaatgacctaaatggcaggcacctctttgaagcagctggcatgatgttatgtggtcccatggccccttacattttcaggtcaatggtaaattctccagagtccaacttcaaccctgcagtattctgttcaaaattgcccctgttcagaagcctgcatatgtaacctcttacattttgtgtttcacaatttccattgaactcttcctacacaccagaatgggcaaaaataggaatttaatttctgggaagatttcctctaagagcctctgtccaaaacatccagtgctgaaacaagaaaaggtggtcctggcatatatccactagtaatttttttgtcttcttcttttctttcctgttttatgtgtgaatagtgaaacttatcggttcaaagaccgatgagtcagaatgctgtcattttacatccaaacagtggaaatttaaattgttaaaataaaaatacacaatcactaacattaccctgatgaaataatgataagcaaagtagtcttaaattacaggctataagtgctggataaagaacaatattttaaaaatatctaaagtcatataatgaacagaagacagatttccatttatacctgaaagactggttttcagaaattataatagaacatggggatttaaaaattgtatttggatcatttattttacagttagaaagtgatgtaggaaggagttcccagaggagatgaaacagattgaaaacagcaaaattccatgacagaggtggcttgaaatagacccttttttcaaagcaataactggcctcttcatcatctatagatagcatttttggcaaaatcagaaacatttgctttgccagtcattgaaggtaaaaagaaaaaaaaaatggctgaatgcttttaaattacatttatttaatttctgctttcatacaaaggcataaaattatcagtttaaattttaaaaaatattattataaaattacatgcttagaagtctgttgattgttttcccacagccattttataactgaaaccctcaattttggatatgaatgtataataaacgcacatgttcattctaaacattttcttttcaaatacttttacattcctttaggtttcctaaagaaatgtaaattccttctgccacttagtttttgctatttttagcagtttcttaaagtctgcaaattcctttcactcagtttttgcacttagttcataatgacttcacatttgacattgattgtccacaaaaggggttatttttagtttcaaaaggtgaacgttatttgttttagaaattctcgcgtatatttcttagtctaaagataggttttctaacataaaaatgtgatagtgtagtctgtttgctgagcacttgtagtggaacaaactcagtgctaaattcttggtttttaataactaatttatttattacagtaactgctaaatatgcttcaaattataaactatttgccaaaattacagataataatataaccaaacaccatgtggatttcacctaaactagaagtaacttggtgactttcttatttaatcttttatttattgtacttggccatacttattgtatgtttatgtataaaaacataaagcaatagaagtttttacagttattatactcactgtcttataaatggagaaactgagacccagagaattttagtaacttattcaaagttacctagctggtgactagaagcaaaacacaaataagaccacagattactagttttgtcaagatcttcaacataatttaatattgctgtcaactcagaggtctcagaagataaggtcttaccatctgaaaacaacaaaaaagaaatttcataaaatcctgtttgtaccaagcaatttatttctagaatgaaagcaaaattatttttttaaagttctttagattgctgagaaatcaagagcattagggttgtgtctcccctttaaatttaccttttagtttctttgggtttaagtttttagatgaaattttaaattctatttagctctcagtttatgtgtatttaaaatttagatttaggatctattctttttaataagggtgaaattacatatggagaaatttactgtttatagcgagttttgacaactagagttgtataaccaccatccccacagtcaagatacatcacttctccccttcccaaacatattccctggtgacactttgtggtcatactcattctccgcctctagccttttacaatgacttctgttactccccctgtagatttgcctattaaagaatgttatataaaggaatcacacatcatgtagcattttgaatctggcttgctttacttgttttaatgcatttgagatttgttcctattgtggcagatatcagtagtagtcttcttttcattgttggatattccattacatgaatgtacaatcacattttatccatttgcccagctaaagaacatttgggtgttttcagttttcattattatgagtaaaccctccataaacatattgcatacaaatttttatgtgaacataagtttttgtttcacctaaacagatactatacaggactgaaattttagtaagtatatgtttaactttgtgagaaactgcccaactgtttttgcaaagtggctgtacagatttacattttcaacagcaacatgtgagagttccagttgctgcacgtccttgtgagcacttagggttgtatttttaattttatccactctaatgggtgtggagtggtgtcttattaaggttttaataagcatttctctaatttaatgcattatattacttctttttgttggtttgtaaactgcttatcttctttggtgagtttgatcaaatcatttgtccatgtttgtgtttttgattatatttcagatacaagtctttaccagttatgtgctttgtaaatgttttctcactgtttatcatttgtgtgttttatggaaagcagaatatttcgattttctggaaatataatttgtcactttaaaaattatgtaaattgctattggtattaagtgtaagaaaactttgcttcatctatgatcacaaatattttcttctgaaaaaaaagctctctgaagagtttttttttttcaatgaatgtgttttctttcttctctccatatgttatcttctgaatagctaagcaatgtttacattatttattcaggcctttccatccactttcacggattccactgaaggagaaattgggtttgaaatcctcttttctcaaaaactaatgagtcatgcatcttctcattgatattatctggctcccctgaaaacctctagtttggtccatttttagtgatatctttctactcaggttcctcaaaccaatctgtacctaagagacccccagattaaaattcaagttcattcttttaacaaattaggtgctaattgctacaaatgcaagaaaacttcaggtgctaatttgttaaaagaatgaacttgaactttagtctgggggtctcttagatatagattgaaaaggattgaaaagaattatagtttctttcacttttgccatcatacaatatgtattatttatatttcttcttcgttaatattcagttcaccttctttgtccatctttctattgaagcaccagtattcatgcagtgttttaagaatattagtccatttttatccattatgtatattgcaaataatttcgtactttattgtcttttaatttgtttgcagtgttttctgccatacaaaaattttcattttattttatattcactttaaaaaggcctttttcagcctaagagtataaatataatagcttttctacttttttcattttttaatattgcattttctctattgtgaatgttatgcttatgtttttctccagctgatctattgaggaacagtgtttttttaataaatataaatattgttatagttatttctcatttcgaagttttacggtactaatttgtctgtcttaaaacttcaaataatacttaattgaaagtctctgtctaccatcatccctttcttaacagttcggtgaatatcttttattatattgtgtaaggatgttgtattgcagctcctcttgctaggctgaacatgcagacctgttctggaaatagatgtgatcagtttaggtcacaacctgtcttgaatcacagctgacttgtagtggagagttccaggaaccttccaatcacacacaggtccctattgctccttttcttctagggctattcaacaagcagagacaaacaaaaactgatctgtcacattttactgcaggtaacagtgaccacaaatacacctgtacactgttttttttccaacattattgaggtgtgactgacaaataaaaatggtatatatttaaggtatgtgatgcgatgttttgctgtacatgtacattgtgaaatgattatcataatcatgttaacatatccatcacctcacatattgttatttttataatcacttttataaattttcccttcagtagtaaccttttgagattctgaaacacttttgagttttgaatgttgtgtcataagtgagtttttttggcaaatattttataaacatctaattgggaaactgtgagaggatgttttgtaactttcatttaaactaagatctcctctccacctccacccttcccatattcagtagattttctatggctgtatggtgtatcaggaatcatcccatatacttcagaaagtaatggaataatataaatatttttctaacatagacctacagagattaagtgatatactcaaatcataccataaatggtagtgaaagggtaaactcaacattcacagccaacttcattatctaatagggaacaacacatttcatattaataattgacttttatttttaggaggctctgttataatgaaattaaaaaatgagattagattatgtttctcaatatatggtacaaaaatcacttacatagaataacttcgattattaaaaatagaagtgaaaaatacttttcagattaaataagatttcaattttaaggcaaatatgttcattttgtgctcaaaaattagacaggaaaactataatctgttaaaatgtaggttcttgatccacccaagaaaccatggagaggtgggggacagttacctgcatttctgacagttagttcattgactcttattcgactaaactttgagaaccagtgtccaaagtatttacttacatatttatatttaaaagctgggataatcatgacaatataaaataaacaattgatgttgtattttacttggcagatagataaagctatacaagtttcctttttcctaattctaaagcataattagaaaaaaattgtatttatttcttagatatggtaactactaaaatataatttggaatgttctacttaaatgagtatacttatgtatgcagttagccgtcaataagatttagtgttctctgaactatttcatttctatgaaggtggtattaatcttgatgataaaattttcttttaaatattgagagattctgccaaaatataaatcttactgtgacaatgttgttgaaattcctttcttcatatgattatttgttctaaaatagctcccatgaaagtaaaattcctactctcaagcatcctgcttaagcatattgtattgttgctggtaactaaaaataaagcaaagcattagggtggatttcagtgtaattttatctgtttagtagagtgatacaaatgaataaattttcaaacatacaaattgaccaattatttgaaagagctatgaataaaataaataagctaccttaaaattattttaaaattatatcacaaaatttttttcctaacaacaaaatatgtatttttaattgttttggttcatacaaattaaaatacaaatataattttaccaaggaaagtgaagtaatttaggagtaattaataatatttgtgttagggaacggagcatagatactattaaacctaaccgttttatagtgcatttgtttctaaatcccttaagctggtaagtcattgatcttgcatttttctttgacaggcttatgcaagcaaagatctggaggagcagttacggtctgtgtccagtgtagatgaactcatgactgtactctacccagaatattggaaaatgtacaagtgtcagctaaggaaaggaggctggcaacataacagagaacaggccaacctcaactcaaggacagaagagactataaaatttgctgcagcacattataatacagagatcttgaaaagtaagtatgggaaataaaatgtatagtaagccttatatatcaaaccagtagaagttgccagcctggttctttaatttcagtgtttgtatcaccgaatacacctttagggcggaaagcaaatagaaaataaagaattacttcaaaatacaacattttatgatttcactttgagtattaagatgacttcataaaatacaggatagataggtccatgcataaacaacacacatttattttttcaggtgatagccattggaaaatttttaaaacagatggctatattttacatactatatctgtttaataacttaaacattctttatcttatcaaataattataccttaatttcctatctgatttggattgagaaatgcttcatttgaaatcaccttttcagatgtcacttgttgctttgctgcttcacagataactggctcagagcgggacttaagctgatgaggtatctagcataaagcttcacaaaaaatgatcatgttgcataaaatgtcatagcatcaattggtggggtatgactgggcacagaggttcatgtctgtaatccgagaccattgggaggccaaagtgggaggattgcttgaagccagagtcagagaccagcctgaacaacacagcaagacctcatctctattaaaaaaaattaaaaagtggtggagtaatttaaaaacatatttgccttcagttggtagctcttaatcgctataaaagtttgatattggaaagtattttgagaacagaggcaaacaaaatggcttcatggttgtataaccaatagtttatgtccttttccaaaaattctattttaggggaaatatgggataagtaaactagtatacttaggaagtacattatttgtaatgcagaatttaaaaagtcaacagtattataggtaagctactaactcatcagaaacaaaattccagaggagagttaaaagggataggaaatattgactttgctgaagaaagttcagaatgagtcccagttggtgaaaaatagccttgtattttatgtagctgcagccacgacattactcaaggttgccaaatagtccgcctgaaaaggacgtttgacttgaatctaaaaccatagctgtcttctcatatgcaactcagttttaaagaaaaataaaattatatttatatttgcattgagagcacaaaaatggcccatactatagagaatgaacatgactctctctgcacatcttataaacattcatatattaaattaccattttcctaagaaagaaaaaccaaacattagtgttgtgggatattggtgtacttttaataaagcataatgctaatttttcttattgcctagctatagaaatgagtttaagaaatatccttagcttgtcttttcaatgttatatcattctcattcacaagtcaatttaggatcccatcagctgtctctttagttatatattgaacttaaatgttaaaatctgaaatgaatgtgagtgatttgcagctgctgtgggctttttttatcttggtggtttccgtaaaacttactgatttccctatgacttgacaggtattgataatgagtggagaaagactcaatgcatgccacgggaggtgtgtatagatgtggggaaggagtttggagtcgcgacaaacaccttctttaaacctccatgtgtgtccgtctacagatgtgggggttgctgcaatagtgaggggctgcagtgcatgaacaccagcacgagctacctcagcaagacggtgggtattgcccattcctgctacctgcgagagcccccttaatcagaagctttaactttggggatgatgtgtttaaacttctggttgctttaaactaacttggttcaactcagggtctcatattttctttaggggaatgaagtcagtttttcagtgttttgtgtgtttgacaacacagtgtcacaaagaaagtaattgatgctttattactttgcaaactcttcatatagtggagtcaaagcctcatgcagaaaacaataaatatacgtatgtatgtgtgtacatgtacgtgtgtatgtgtgtgtgttgatcttcaagaataaacatgttcatttggcaataaaatacttttaaatgggtgagttttcagatggtggagataacagtgcaaacagtattcaaagtgtaaaattaaatgcgtgtgttctgtgaaacagtggtatagtattgaaataagccatctcactgaagaaatttattgtcttcctgtcgaaagcaaaggaaataactctgacactaaatctcagatgttttgaataaactgggaagtttatctcattaaatggtaagcttctgataaccaggaaatgtctcttaaggttggctttggatcagggattttcagaccagacacataaacccgctttgtgggccttacgtggtagaggaggctggctgtggaacacgcgtatgtgctggcgataaccatgaaagtgttgtttgaaattgtgtgcacctctggcctctgaacagaaatgtttggagaaatccagtcccgtgggctggactgaagcaaacttctcccgaaagacaaaactgtggttgtcctaatgacctttctaagctatttttggagttagactcacacacgtaaatctggctaaattcagaactgttctttgacctggagaatgaaaaatgaaattgaaagatgtggtgttagatttgatttgtatgatgtggtatgacagaaaattcacattttaattttatgcaaactttagctgatctacatggttttcagtaataaaacctactcttatttcaatatagtattaatagaaatcagagttaagattactatctcaattccatgaactacattttttcagctagctgaatatttccaaaatttttactgttacgatcatttggcctctgagtttggagacattgtcttattatacaacccaaattaattgctttcttttcaaaaattgagtttctttatattgctcacccacttgataaagaaacaagccattttagattaagacttgcaagaagaaacaaaaaataaattataaagctaaattttctattcagcttgcctctgcctcaactctaaaggttaaaaaaaattaaaaggtgatgctttggggcctgctatcatttcttttagtatcatagttagttaagcttagccagatgcaattcattctgattatttcctaaaagcacagcaaaataatgtaggggtcgttccaacatgtgttctcaaggaatacaatgtgactctaaacatagtcctgcatttagaaactttaccagaaaaatgtacagttgtaggaacatgacaatatttcagtggttgccaaaattataatatttttgatagactaacatataattatactattggacatagcaaaagttatccttagttcatttatcctccctgagtctttatcaaacaacaataaacaataagacgttatagttttgtacttactattctaaataaattaatactactttaacaggttttattggtattatgtattttatcataaccctgaaatcaaacaggattctttaagatcctctaaattttagaactgcatactttaaaataaattaaatagaaatacttaggccaagcagatattctttgaaaggtaatattcatttttaaaacatattaataattaaaatgttgtttttatcttcaagccaaacctcttaatgggaattttggtatactgagtctcttgagaaatatgtcatttccttttaaagttagagaaaataaatatggatgatttaggaattgaaatatacaatttttggaatgccgttaatgatttatattttaaaataattcagttaagcaatatgatgtattctagattatattcctaatatggtatttgatttaaatcaaatagtaaaccaaggtactttggatactgtttccaactaataagataaccttctctctgctcttcctccttccatttcctttcttcataatcttttctataaattactttcaagcatattttttaaaaacatagatccaaatctatggctaggcatggtggctcacgcctgtggtctcagctgctgaggaggcagaggcaggaggatcgctggagcccaggagttcagggctgcagtgtgctaggattgcaccactgcactcccagcctaggtgacagagcatgaccctgtttcaaaaacaaaaaaaccccacagagctgatgtcagtctccagcataaaggcctttcagtgatttcccattgcttgtaaaataagacaaaaatcttttttgaaggttatatttattgacatatcatagctgtacatattttggggtcatgtgttatatgttgatacctgtacaaaatgtgtaatgatcaaatcagggtaattgggatatccatcatctcaaacatttatcttttctttctattgggaacaatacagtacttctcttgcagctttttaaaaaatatacaatatatcgttattcactccaatttccctgatgtactattgaacactaaaacttactccttctatttaactgtgcttttgtacccctcaaccatcctctctccatcctccctacccttgcccctcccagcctctgataatcagtattcttctctctacttccatgagatccactcgtttagctcccacataaatgagaacatgcaggattttcaagaccacatctttatcacaacctgcaatctctgccccatagcccctgttcagcatcatctaatgtaatgattcttgatcttgtgcttccagtgctctagactttctccaattcctgggcatcatcgtgtttcctctgctcctgggcccttgcacacacacctttaggttaacctggccttcctgtctcctctttcctgaggtgctagctcttcagatcttaatttgggtgtcaagtggctttggcaaggcctcaggcaagactttctgacctatttggattagacccaatatttgtagtaaatgctttatagtttcccatatttttaaaatagtatttattacagcctataatcacatagtttatagttatgtagtcattgttacttgattaatgtctccctcctccacaaaggcaaaaacagatccgttcactacttatcccagtgcctaccacagaatcagtgcacaaatctcttttagtatcacataaaaactgtggaccctttcatgagaacaaatgaaaatatagacacatccacagcatttccccccacagttttagggagtttgttccctgacccctagccttttccctttaaaccaggctttaaaactgctgccttgaagattattaataataaaatagctgattaacacacttgtggaattttcaaataattggtctttttgctaaacaaacgtttatgctatcaatttagcttgatcttttaaaaaatatctgtttctggagaggaacagaaaaggtaactattgggtactgggcttaattcctgggtgatgaaataatctgtgcaacaacccccatgacatgagtttacctatgtcacaaacctgcacatgcacccccaaacctaaaataaaagtttacctatttaacaaacctgcacatggacccccaaacctaaaataaaagtttacctatgtaacaaacctgcacatggacccccaaacctaaaataaaaccccaaacctaaaataaaagtttatgtcacaaacctgcacatgcacccccaaacctaaaataaaaccccaaacctaaaataaaagtttacctatgtcacaaacctgcacatgcacccccaaacctaaaataaaagtttacctgtgtcgcaaatctgcatatgcaccgcgaaacctaaaataaaagtttacctatgtcacaaatctgcacatggacccccaaacctaaaataaaagtttacctatgtcacaaacctgcacatggacccccaaacctaaaataaaaccccaaacttaaaataaaagtttacctatgtcacaaacctgcacatggacccacaaacctgcacatggacccccaaacctaaaataaaaccccaaacctaaaataaaagtttacctatgtcacaaacctgcacatgcacccccaaacctaaaataaaagtttacgtatgtaacaaacctgcacatggacccccaaacctaaatataaactttatatatgtatgtatatatatacatatgtatatacagatatacatatatgtatctgtaaaagaaacatatctatctatatctatatctagatatccagatgactagatgagatatagatatctgtttctcttacagataaggaagaaaattcttctttattctctcattcattagttaatatgagcaaaagccaacattatatctttcttactattggtcaaccaaataaatgcatactttacatatgggccaaatagatacctaagcataccttaggtaaaatctaaacttggaaaacagaaaatcagtacattgttagtaagcaaagtaaataaatttagtcttctattaaccatttgagttttttctgtgaccattgcatattcattttctgcattggtctaattaggtgtcacattcacccagtgggtattggagtgaaagtatttattcaagggtaggtgtgtatgctcagtagcataaaaattgctctatcaagagggaggtgttggagaggtttaggctttagaaattgcaaggcttcgctgggcactgtggcttacacctgtaatcccagcactttgggatgccaagacaggcagatctcttgagcttaggaattggagaccagcctgggcaacatagtgaaaccctgtctccccaaaaaagtataaaaattagccaggcatggtgttgtgcacctgtggtcccagctacgcgggaggtagctgaggtgggaggattgctggatcctggaaggcagaggctgcagtgagtaaagatcgcagcactgcactccagcctgggtgacagagccagaccctgcctcaaaaaaaaaaaaaacaaaaaaaaaacaaaagaaaaaaattacaaggggccaggggtaagatgagcatttagtgctaagtgtaagctgcatataggtgaaataattttgcccagtctacttagtacttaaacatcagatatttgctataagaaaattgtctactttagatcacatggaatcttttcttgctgtatttcatctctttcacctcccagctttgcagaatttaggcttacttttataatagatttacaatgttgatatgagttttgtcaacttcttcccaatcatttgcttgtgtgaaaaatcaggacttgcccatgaaatttctgaagtttgtctgcttttttgttattggttgatttttttttcagttttttttctatcctattggtgggctatatatttacaataatcacaatatttatacattctgatctgtaatgcagtcatattttaaaatttatatagcattagtttttattttgtcattttaattttttaaagatttgaagattttgagaattaaaaatttgtagttcatcaaaaatatggtatttctcctgagaattctgacctaagacaccttctctgcagactgtaactctccttgtattttctcatctacttttttttacttttcccaaacctttccctccaattcaggcttctttcctgatttctatactgtccactcaaccttgtgacttggctgtccctcagacaggtcagtctgtctcacttaacagttagaacctattccctaccaccttgcccaaataagcaagtaagtgaatcctattctttttccagtgttctgtgtcttagtaaatgacatcatcattcagccagtcggtcaagccaagttattcttcctttcaccaaaactaattgctattcaatctaccttgcaaacatctctaggacctatccagtgtctccacgctgctaatcccgctctgatctaggtcacatttaccccttacctagaccattcctcttggacaagcctaataactggtctcctacctccattcttcctttcctccaatctatttgccactttttagcagtgatttttttttcttttcttaatgctaagtcagatactgctaaaaactccttgataacattgccttattgggatggagccagcattcaactagtgtggtgataagcttatcttttctaattgggttgcttaggccagcatctggtcagattgattggtacaaatgttctaagttgttagtgttttgaatggaactcttctttcagacaaaatcccttaaacataatttcctgggccctcaatgatctggatgctacctaagtgtccagcctcaaatgtcaatgcttttccccacaaacactacttaccactaagacccaaattcttttcacttcttgggttatgtcaatatctgtcacctccagtattgcaatgctgtactctgtgtttgaaacatctccctacacatgatcccgtatctcgatgtatctagttaatgtctactcatccttaggcctaaacataaatgtgacttccaggacattctgttatgtgcttccacagcatccattgttgctgtatcttagcatcattaccttatctgtcagattgttttatctttgtttaattccctaggttttttttttttttttttttttagatggagtctcactcttgttgcccaggtgggggagtgcagtggcaggaactcagctcactgtgacctctgcctcctgggttcaagtgattatcttgcctcagcctcccaagtagctgggattgcaggtgtgcaccaccacacctggctaattttttgtatttgtagtagagatggggtttcaccatgttagccaggctggtctagaaactcctgacctcaggtgatcctcccacctctgcctcccaaagtgctgggattacaggtgtgagccactgcacccagtcttattccataggttctagactccatgaaaacaaagattgcgtctgcttgttacactgaacaatagcacagtagttggcacatagcaaacacttagaagtgaataaaatgaatatttgaataaaaagaaacaaatttggggtcaaaggtcaaattttgaatatgctgatttgaaagagtctgaatggtgtttaggtggagataccagaaggtttgatgtacaattctaaaattttagaacaataactgggtctttaaatatagatttgggaggaagcatcattctgataaatgtcatttgaagcctggtgtgcttattaattcttagggtattgatgtatcacaagagaagagcaaacatcagtaccaagggaaagccaacattcatcattagctgtgccctgcatttccctctttgattttgtattatcatgcccttttcctatccaaaggattcgcttatatttttgtttatagtataaggaatttttttttttttgaaacggagtctcactcttgtcacccaggctggagtgcaatggtgtgatcttggctcactgcaacctccacctcctgggttcaagcgattctcctgcctcagcctcccgagtagctgggattacaggtgtccaccaccacgcccagctgattttgtattttaatagagataggttttcaccacgttggccaggctggtctcgaactcctgacttcaagtgatccactcgcctcggccacccaatgtgctgggattacaggcatgagccaccgcacccggcagatagttttaatttaaattcagttagacaagtgcatgtggtacacccattatgtgacgcttcatattatgtactaaaagcatgctatgcacaaagtgtaggtgtacagtgatggatagatcctgccctatggaactaacaaattagcaagcgaaatcaacatttatcaagtaattaaaagtagtttaagtgttgtgaaggaaaagtacaaaggcttatggaagtgcatatccaggatgtttataaaccaagggaggtcgaggcataaaatttctgaaagcaagaatgcagtgttcctacatttttactaatattccaagttctgaaaacgtgtacttaagtagcagcttttcctgagtttattcaatttattgcattatcagtgtagtatgaatgggagtgtgtgatgatttccttcaaatataaaaggaaatttcttaatgctgtgttttcttaaggtaaaaaaaaacaaaaaaaagacttttcgttttgttaaaagagttccaggcacattttgtagcaaagccaccaattggcatgatgtaaattgtaaggacaatgtaccttaggtaatgttaaactcaagttttttatagatacttcatagaaatgcttttttaaaatgggactcaatgaaggggaggttatcagggcgtgtgaggaagccagctgttcattgaaaagtaaaagcatatgcactgtgcattccaaagtatactaatggataaaaactgcttcaaagttctccacacaagtatctaagtggctttgaaaagttaagtagattggatgtcttttcaacctctttcataaacatacactttgagtatattttcttatgagaagttgtatgtttaagagatataaccaaaaagtagaaaatgaattttgcagggggtaaattatttggtgatgaaagcagaagcagaagaaagtcatctgcttttgaggcacacatttggattaaaagttacttgaatgttagtatttaccttatatattttactaaatctaggaaagaataaagaaaaacagctcaatctctagagtcttcctgaaaatggtggggttaaatcaagctcaaggaactagaagttctttgctgtgttcattagtgccagactaaagaagccagtttagttaagaagctagcttgctatgagctaattctgatacatagaagcagcattattttaaattctacattgccatcttaaaaacaagcagctacttctttttcattattttataaagcaataatatgagcaatcaataatatgagcatgtatattaacaaagacatgctcgattatatttaagttggatgtttcataaaattttacaacaaaaaatatttaaacctaagtaaaatatgcaactatataatgaaattagaggtattattttgcactgcagtcagagatatttcttccattaattaaacagaatactgcagcagtctggaagattaatttattacattcctttgtattcagcaagtggaacgtgatttgtattgtatctttagcaagttaatatttggcaagcacagtttttggaaatcaggttttatcctgatgtggaaaaagaactctatgccagtaccagttatcagaactttctttaagaataacatttgccttaagaacataattaatgcatctgtgaaaaataccacttttttccaacccaaggtacaatgagattcacgtattttattcagtatttctaaaactcttcaattgaggtttttattttaattgtggtactgtgtatactttttatgcataacaatatgttaaaattaattcagtaccagatttaaatctgttaggctatctgttattccattttctttcccaaacccaatttaagttccacaggccttttatagctggccatgtggttgcaatgctaagtcaaaatgctaagaccttttcccattttggggcattatttctttaaattcgttgtagttttaaaatctgattttatagttattaatcatattcttctgggggtacatatatctgtacttaatggactaaagtttggaatatttaaatttaaattaaatatggtagtgagatttgttctgaagagaaactggttatatttaggatataatggtgttttaaaggaaggcattttttgtgtcatatttgtatccacacaaacattacttataatttagtactaaattataactcaagatcctctcagtaaggaagttctacacctttttcttgaatagccagcaagataagtacgattaggaattgttgctttatagccgttgctatgctgctgtaaacaacctattgtttcaaaatgtggctttatttgaagtccattcttgttggtgagaattgactattaaatattcctattaaagaatgccagtagattacaactgggaacctctcagttggaaacacttgccatttcctcttgtttattatagttttacagaatatacagtcagatttttttttcagtttccaaccttgcttaaatgcctttttttatatgtccttttgatcttctccaaaaccaacaactggtattatatgcctaaagtatatgtcaggcttcataatgaattgtattattacaactttttttgtgtcctacattggacacaagttaatattacttattggttcagaacaattcactttattgtataaaactgttttagaaaaatcataattttcaaaatatcaaattataatagatacattatcagttaaatacatcatcaatcagtatttactaaataaacatacttggagctattagctagtgctgaataatacataaattttatgtgctatgaacttaaatgtagaacagaaaatactattatatacacaataaagcacaaaatagtctgacaatagtatcatgattcatattttcttaaaataatctacttactgtttcaaacattgatatgtttggatagatctaaactcttttgagaggaaattctagttactatgttagttcagatcattattaatggcaagaacaaattgcataagggaattaaactccagtgtttacggtaagctatttggtatttcagaaattctaccatagtatctctctctgtgtatatgtatgttctcattcaccctcaccgtgaggtctctttttttttctttttcttttttttttttttttttttttcggagagggagtccacctctgttggccaggctggagtgcaggtgcagtggtgcaatctgggctcactgcaacctctgcctcccgggttcaagaaactctcctgcctcagcctcccaagtagctgggattacaggcatccgccacgccacccagctaattttagtatttttagtagaaacgggatttcaccatgttgggccggctggtcttgaactcctgacctcaagtgatcctcccacctcagcctcccaaagtgctggggttacaggcgtgagtcaccatgccccgccctcattgttaggtttctgatcagcatagaggcaaggtcattactgatgactgttatcctgagattctagcaaggtgcttggtatcatgtaggtactgaataaatagttactgaaaactaaacaaggaaagattttaaataaaaattttaaaatttagaatttctttaacaaaaatttaactaaatcttggctgatgtgaatgatgataaagaacaagagaaagaagaggaggaagagaaatccaaacattacactgaaatcaccattattattatccctattttataggtaatgaaatggaggcttggggaagttaggtaatttttccaagtctcagaagtagtaaattgaagatccaggactctaattactgtctgtttctcaagactaagtaaactcttgtttattcttacatacttcgtggagtagggaagttgccagtgatttgaaaatgttatgtatttattttgggagggcgccatgcaagtttataatgcacttctaattattattttttcagttcaaaaaatgtatattttctaagcacatactatctaggaaaaaaagcttacggaaattcttagtaacgtagggattaaatatagctatgtaaaaattcacaaagtggtctgtaaacaagaaaatagaatttactatatttattgaaaaggcagtagaaactgtaatcatgtctaactgataagagtaagtcagtcaatatacacacatgagaccagcacagaaagaattagaaaaattaaagaggcctctttagtatgtgacaagagctggtataggtacaattatatcttaatacatacccagatggcatattcccagtagatattactaattttcctgaagttgatagataaataaaactcaattatcaagactctttctacttttaatattatcaaaggtatctttctctggactcttaaaattttttcacactggtatcatcaagtagcaggtcaaaatttagggatagaggatgtgtttcaagagaagaacaaaattttttaactttaatttttcaatctctgttccttttgacaaaattaactgaattcagcctgccaattgctacttagacacaaaaaagagaaatgagacattagttattaagattttgattttgattcctttatgttgtgatttcctttatttcctttaagtagttaaactgcaacaaagatttttttctctccaactgtaaaaaagtcttccattttaccacttataaaagtcttcaacttagaggaaaagacagttctctaaacagtgatttggttttagtgctgttttacctgtctccttattcttttagtcagtgtattcaaaaacacatttcttgcagcctttgaaagcatagagccacacttagttttccaggaagatgctttcttaatgtgaattagctattcttcatctcaccagaacattcttcaaagctgctgttcctgaattcatgcttgatacccatgggtggatcctgatttgtgaacattatctacctaggcatggatgaggtctctccatgatcactgatactgctcacggcaatctgtctaccatttggaaaacaggctggggcagaatctggaagggcagccatcagtgggagcaggaatgatgctgccaagggttaggggtgggaaaacataaactcttctacaatagctgttagttatctcaaatagtgccttaccttcactatcaggctctgtcctgcctggtttcactggagacaatgccaaatcctgctgtgcttacttattactttgtttttgcattgctataaaggaatacctaagactgggtagtttataaagaaaataggcttaattggcttatggttctgcaggctgtacaggaagcatgatgctggcatttgctcaccttctggtgatgcctcaggaagcttgcaatcttggtggaagggggcgctggtgtgtcatatggccagagtgtgagcaagagagggaagggagaggtctcagactcctttaaacaaccagctctagcatgaactaacaggaaaatctcacttcttaccgaaggatggtgctaagccattcatgagggatctggtcccatgacccattcatctcccgccagctcccacctctaacattgggaatcacatttcaacatgagatttggaggagacacagatccaaaccatatcagattacaaacactgtgcgtgtaagcaaaattgtttctgctggtctgagccacttgagccctttcccactagtcacatggagcacctcttcttgtcccccgtctccactgctgcttccttcctacagcccctgccctgccacagcccttggaaccacatcgggtgctggttatctcctgtcaattcttgttacatttgacttcccgaagacatgtggccctgtgaccacacacacctgtttgaagctctcccctctttctctggcacccgttggcttgacagtctcccctcctgatgctccatcattgttatgcttcttcccagacatattcactagttcctttgcctcttcccacctcatagatgttcctgtgccccaggtttctattcttagacattttctcttttcatttagagtgctcatcaagtaatctcatcaatgtccaagactccaattacagcttaaatgttcatgacttttcaatggctctcctaaactctagacacacatatgtgactgcctactagacctaaattcttaggtacaccttcctaccatctacattattgcagagcttaaataatcaaattataaattatacaaatataaaaaataagtaattttataaatttattaaaaattgctttttaaaaccactttgtatgtcttctgtagtgctagttcttaatatagattccatagatgtcttaaaagatagaaaaattgtagcttatgaagacactgcagaattctctcttaaaataggtatatatagtgcaaaggattactgccattgcaatatttcacctaatcaaagattttatccaacgtgtataaacgggtatctttttagataagaaactggtcaaaatcataatagtggcatatgttgaggtcacatagtgaagttatctatgcagatcagacagtattgtggagaatacctagaatcttgagaatttacacaaatagtaataacttagatctgtatagcaaataatatacatatcagattcatttagtttatgtaatctttataatctgagaataatgagtcaagtgttatccttagtttactgattatcaaagaaaaatacagcttggagaagtcaaatgaattttccaaatttatgctacttataaatgggagagctaataaaagccacctgtctgggtataaccctgtacctatttcttctaaagcatattgttttctaaagaaagtagttacattttaaatgaatatataaggaatacatcttgaatgaagacaatatgcattttataatttacatatttctgtatttcattattcagaattcatttaaaaagtctccttgttggcatggacaaaattggcagctaatcctatcccataaatattttcaatggtcttcagctgatggcgtgaaagttcagcaaaggccaagtcacaatgctttgaagtttgtcatcttttttatcactgctcagattgtcatgaagacaccaagtaatacatggatcaattatagttaaatgactgcaagttgatcttatcaagcagttagtgggcaagatttcacttttaccattttttctggtaatgatttagagtgtaagaacactaggaatttaaatctacttagttttacttaatcaatgatgtatttgtttatttaatttaaaacattgtttttggagaaggaagagaacacaagaagttcttgatccataaataaggcgttcagaaggagaccagttaaactaaattttgactgtaattcagaattgtgtaaaatgccctactttattttaagctcattattttcataattcctttaccaagatagcagaaacatggctttatctattaaattataaatgtagttttttttgttttaaacataatcaatttataagagatctaagacatataaaactacattgaggtagaaatttaataaaaattaactttacatctatgtaacttacgtctatgtattcagtttatttaaagtaggtcataaccaagtatttctgggttgtgtggccaatagctttgctcctaaatcacaaagatgtttctgtgtgtgacactttttaaatccctggaatattttaaatgttcatttcaaataatctataactttgaaacagttcttttttcttgaacacattgttctgtcacgtctaataggataaccaattagttggttatcctaattctaatatgcttcataactagtgacataagataaacatatggagtatttattactctgataaaagatactggttaggagcaagacagtttttactttgtaatcataaaaacatagcgtcctgcgtacactaggcagctacttatatagagctaatctcactctttttcggactccaatatttaccataaaagtgctttacagcatctatataattttttcttctttttgtcccttctttgtagttatttgaaattacagtgcctctctctcaaggccccaaaccagtaacaatcagttttgccaatcacacttcctgccgatgcatgtctaaactggatgtttacagacaagttcattccattattagacgttccctgccagcaacactaccacagtgagtatgaattaaatctattttttctgcatcctctactaatattaaattattttcaagtaaacataagttaaacaaataacctctgtgaaatttactgtaatatactctgcttcaaatacaaaacaaagacaaaattttgtatagtatacaatgaaaataaactgaaaattaaaattcagtgggaagcgtattttagaggcaaagtaattcacaatataaaagaagtatgtctgtgaaataaaacacattccaccagtgttcataaaatatcagtaaggtagcttaattgatttaacattcctgaaatcaggtatgctaactcataaatcatattaaagttcaaaacatttcagccttgataagattttaggccaaaacaaaaagtaaatataaataattttatatctattagcattcagttgctttcttcaatctcaaacataaaaatatatatgtgtgtgtgtgtatatgtgtatatatgtatctccatgtttcttatttcagcaatatttgaatagtgaaatagtgcttaattacttgaaaaaaatttctgttaatatcatttcaaattgacattcaaaccattatttgttattcaggtttcctttccatcctatttttttggaggggcaaatggcagcatatacctcatgtgatcatataggagaacttatcacgttctcctgtatgatcatgttctgaccctgtgaatagctgataatgaattaatatgcattactgcctaagatctgagagttttctgccccaaagtagggatgcaaccctttgttccttaggatatccggtgcatatggatgaaacttacataactctagcatttgtaacaaatgtataaataaattgatcaaaatacatatatattacaaaaaagaaaaccttacatttttaaaagactcaacaataaatgtaatatgcaaaccatggttttccccactgaatcacgttgtactactctgcttagtgtggcagatagggggaccccttgtttgtccagggacagtttaggaaaacctggaagatagcctaatttgagtgacagagatctgtccccttttatgtgagaaagcaaagatcttacagacatttgtgaataaatgtatgctaatacaagcaagagaccactaccatctgaactcaagaggatgccgtatgtgcaatttcatccccgcaggctagagagttctgttcaccttcctcagccctgagcagaagccctcagtgactcctccattctgagagctttagccattatctccatactcatggcttccaaaatgacatttgaagatctaaccatatttttgacttataatattttatctaaatctatcttctattgctttgcttgtaattatattagctgtaagtacaaagagaaagacttgttaaatcctttatttctacattattcatggcagtgttttctcattttctttgaggccttgaaatcacagagttgtcattacttcttcttcttcttctatcccatctaaacacaattgattattttggaggagggggagatatgtgttccaagctaaacttatatttcatttccatcactgccattatcatccacttcattatgcatgtctctgatctaatgcagtgatattaatactagttttcaagcatcaagtctttctcctgttgtataatgtcactgttttatgaagtaagctttaaaaggcatcgtttcattcatctcaccagaaacagtgactttcagttgctcaaagaactgagcacaaatttctcaccaccctattctggtgtcagccttcctttcttgttttgtcttccattattcacccagtctgtgtttcaccaagtccgattcccagaacgccaagctcatttcctgctctgtatcttgtttctattctggccctggcttgtgttctgcctttccaaagccctctccatttctcagagttcaggtaaaggtctttctcctgcatttgtcttgtccgaataccacggccaactttgcttcttgaatacccatagcactcactggattaacttcatcctcacatggctttatcagggtctgcaaatgttgcatgtggaactggattatgagagtgtttccagtaagtttatattgtctgcaacattcagctaacaacactcaaaaatacttgagccattcctgtgctctcagcccctttacctgcattgtctgatttaacccttaacaaaatcatctagaaggtcagcagcagcatttgccttattttacagataaaggtggaaatcacactccaaagctgttggctaaataatgtacataaatgcttgttaaataaaatgactcatttcctggatgtattttatagcatttgccatgttttcatcattacttattcatataactactatcctatacactgtttgaggtcaagaagagacaggaagctacagcaaaaagagcctgagtcttagagtaagccatacctgattctgaattcagatttgccactaattcattctctgtgatcaggtaggtgttttatgtctctgaaactcagtttacttatatataaactgtaaagatgtaaagaggattgaatgaagtactgaatgcttatgcaatgcttagcagagtgtctggtatccagaaggtagtcattaaagggcaaatttattattaccattaatatctaagtctgattcatttcctcacccatgtgtttttcagtatttttaaaaccactatctacagtaagaaaaacattttatattccaaaccaggatgtgtggtatacacacacatagtgtgtctctgtgtatatatatatgtcgatattagagaattttaaattagctagataacttcacatgtaattaattatgtataagcataaaactaaaacaaattaccatttaaaaatattgtccttaattatggtgctgctcaagctttctcattatcacaaccccaaggatccttttataaacattttttccctaatcactttccccataaaattttaatgtaacaaatatactctgtctttatactatatgtatctctgtgctttatacataaaaaggaagtgtaaagtttacttttttgttcaatgtagtgttaaataacaaataaaatgtttaagttaacatttaaattaaaaatttttaatctcttaacagctaacataaatttataattgtatttgccaggaaacttttaaggtaatctgtttacttatataaattgtaatatatcaaattacatatgcaaagtaacaattgatatgaatatataatacaaatataataatttataaaaacattcaaaatcactatttttccagcaaaagtaaaataatttttaaaataacttctttaaaaatatttggagagcttaactattaactttgctcagtatgagaaaacttttaacttatatagatgataaatattaatttagatattgtcaactttttcttttcatcatttgacatgtaatggtatgactaacatttgtagaattaataataaaatataaattattattatttaattctcaaagctcaagtcacacatgaaaacaccaaggaccaagcataagcaatatccacagggcaaccaatggcagccaataggcccacataggtaccactcagtatatgtttgaaatcactcagtcaattaagagaaaatcctccagtcatagccatctagtcaccataatttcatagctcatatattgcaaacacttggggtgtgttccgttgccaatgctgttcatgtaatggccaataaaaccaaatagaatttaagtattaaggaatattattttcttgggttttggagagccaaaaatcattgagatattaagattttagccccatccaggcctcatacccaatttttacccccttagagatgattttactccctttatgaatatttgccttattattacgtgtgatatacccaaataatttttctattctgtttttctttgtgaaaatattggtctcaaccctttatgaattatggcccacaattcaataaaagctacactagtgataatatatatatgatggacatgtgactatgttataaaattctaacatttgttaagatttaagaggaacaatcaccaccacggtggctaaaattaaaaacactgacaaaaacaagtgttagaatgtggtgcaaccaaaactcctatgtcaccaatgggcattaaaattgttcaatcatttttcaaaacagttgacagtttcttatgaatttaacatgtacatatttccacacaataacttgtgtacaaatgttctttattagtcaataactggaaacaactcaaatgcccatgaaagatgagtggattaacacatcttagtatatgcatacagtggaacattgctgagcaatgtaaaaagaatgaactactgatacacacaagaacataaaaggatctcagagacattaagttgagtgaaataagcttggctaaaaagagtacattctctatgatttgatttacatgaggcccttaaaagacgcaaatgtactctagagtgagagaacgcaattcagtgtttgtttgaggatttggatcaggattgactgacaatgggcaagagagacattgtgaggtgttagaaacattctttattttgattgtgacagtagttaatgtggatacataaacttacgaaaagatgataaattcaaaataggagcatgttattgtatgcaaattattccccaataaaattgatttttgaaaagcctagaaaagaattcctttattaagtacaattttttaagtagcttaggtttcaaatagtagatttctctttttttttttttttttttttttttttttgagacagattctcactctatcacccaggctggagtacaatgacgtgatctcagctcactgcaacctcctcctcctgggttcaagcaattctctgcctcatcctcccgagtagctgtgattacagttgcccgccaccatgcctggttaatttttgtatttttagtagagatggggtttcaccattctggccaggctggtcttgaactcctgaccttgtgatctacccgcctcggcctcccaaagtgctgggattgcaggcatgagccaccacgcccagccaaaatagtagattttttaaaacctttacaataacattttaagtcaaatctttgattagggagggagatttcccacagtcatccaaaaactatacgttgagtcactaagataaagaatgcttctagatcctattagagaaaacaaagatgcgcttggctggctctgaacttagagcacttatagtcaagtaagaacaacacatattatagttacattattattgttttattttactaaatattacaaagcaccaagcatctgccacacattgtctcatgttcatacaaatactgccggtggctccattcgtaatacacatcacatagtacaaggctgaagagtgtggatgctgtagggagcttccagttttgagaatttagtctctgatttctctttgagtttgagtaggttctgtaaactttcttgtgacacattttttttaatctacaaaagagcacataagtaagaatgttacatataacatcatacagaatatttataagctaatcttcactgaaatcaatctgttcaatagcattataccatatttgacataccatagccatgttaatctgatattgtagaatagcatagtataataataataactcctaactcaaggatgttgtgatctttataaccagcaatccatgttaaatattagcacagtgcctaaaacatattaagcattcaataaatgatcgctactatttttactaacatcctacagatttggaaattgagtcttagaaatgttaatgtgtaaaatgctaaagagccaaaaaaactgccaggaaaatataaaaattaaaatcattttatttctgaaacccatgtgttccccccaatatcttctaacatttctagtatttacagaaaaactttcaagtctcaatatcagaaagtttcataaaagccagaggaagtagcaattctctttagcagacagagttagataccaattttcatattggtgttctcacagattattttttccaattatttcctctcatattttcttcaaatttaactccatgtatttccatgggccctttagtagagactttcttttcatggagggagtcatttgtgattaagtagcgatcccctagattttcctccttggtagtagtgtttgtttattcattcatgagacatttatgtcaggtcttctatctctataatactgtattaggaaatgtggggtatttttaaatgaataatataattctttagctaaaataactcatgtactagagtacaaacaaacaatatttctagtatagtaagtgtctaaaacactatgctgtacttcattcactcattcaacaaatagcatttgtgtttctgctagatactaataaggtggttagaccacagagatagaaagatacatagaattgttactccagaagaaattccattcttgaaccagacatgtaaacatatgactgaaatcagtgaaatcagtgtggtgaggaagcatcttggagacatggctacagtagagaggggatacatgagtctggagaggtcaacagaatcacatatgcccagccaaggatgggctgtttcttaaagtctcttgagaactactaaaagtatatatgcagagatgtggtatctgcagttttgtattatagaaagaacagcttggtggcaagggagtgtgtggattagaggaagcaaaacgggaggtggaaaaattcgggagtaatcatttgaaataatctgagtgaaaaataataaagatggtggccacagcagtggatatggggatagaaagaaaagaggtggaaaagacgtttgaaatacaagaaagcatatgacttgggaaccgcatatgggggatggtaaagtgggagaagttgaggatgaaactgtatggatgacattcaaaagacaaggagcacctgttcatagtaggaacttacctgaaaaggagaactgagtttttaacacatgttagcttgagtgcttgtaatatttgtaagacatcagagtggtagagtaattggaagagatgacctcaaccaaaagaaatatagcaagtaagaagacaagatgagccacagatgaaactgtggggaaatcaatatttaagaaacagttatctgtagagcagacacaataatctggagaaacagtaatctgtacgggagactgagaagaagcaatcagaacaatcggaataacaacagagagagagaccacaaaagccagtggagacatgagttcaaggaaggaggaagtggtaagaggtgccaaatattagaaaggttcaagaataactgggacttactctgttagctgaacagcatgaaatagagatgtttatttactaataacttaccatactctgggcacagagagggagaatgtgttttgagaaagggggagagaaagcaagacagtgaaagaaattcacatttacacatgagaaactgaatcagaaagggtaagtaaatttccccaatgtcacacaactagaaaagtagcaaagcagagattcaaactaaatttgtttggatataatccatttcttttgaggtgtggctatgactgcatttttattgttttttagttgatacataattgtacatatttatggggtatatgtgatattttgatacatacatataatgcgtaatggtcagctcaggatattttggatatccatcacctcaaacatttatcatttctttgtgttgtaaacattttaaatcttctagctattttgaaatatataataaaatattattaactattgttaccctactgtgctgtggaatactagaacttgtttcttctatataactgtactttggaatgcattaccaacctctcttcattccccccacaactgacccacacttcccagactctagtaaccatcattctactctctacttccgtgagattcactttttggctctcataaatgagtgagaacatgagatatgtgtctttctgtgcccagcttatttcacttaacataatagcctccagttccctccatgttgatgcaaatgacaggattgcattctttttatggctaaatagtactccgttgtgtatatataacagattttctttatttttaacttctataaattaaaaaatatcaaacatcaaggacaaaacaaaaacaaaacaaaaaagttcccttctaccccaatttgaaatgtaacaactatttttttgtatttactaaagatacaacccaaatccccagtcatcattcttcactcttcattcccagaagtaaccaccactcaaaaattgtattattctcactcttctgtatttttatggcatctggatttattaacataccagaagatattatacagtgcagctttgagtgttttgtattttaagttaaaatgttggcattactttttttctcttgacattatgttttacagatatagtcatattgctatctgtacacctggtgtattcatttaataactatatagcattccattaaataaacacaagtttttatgttttttttattctgtgacgatgtactatagggaagtcaatatacactacagattagcaagagagtacaatcaaagaggagagagtgatgtcaaatagacaaggaccttgaagttaatagtgctaaatttattagttatttggttagcatggacaatgtccctaaagatgtaataaaataacacgttctgtgcacagttaataaaccaggttgatttcagtcttaagctgtgaaagcaattggatattaaatgaaaacacaatactgtgattctaaagctttgagcagcagcctagggaatttcacctattctgtagaggtattaggggagcagaggttgtttctgggtagaggaatgattgacaagacaatgttcagcatagccaagaaatcttgaattatttttaatggataataaatatagaagataggtattatttcaatttggaagacagtcgcctcgtggtgaaaaagagaaaagggatgaaaaaagatgaggaaaaaaaatggataaatctagcctgaaggctaatttgcatatttatttatttgctgtcttttatttcttttattaaaatgttgacattgtttactcagtaaaacttatttgcttgcaagaagttacacttactagggtttatttaagaagattttattcttatgagaacatgtcttatttccaaggaatagagtaagtagatttatagccaaggaaacatttgatttggaacttgaggtctccgtgtttttggtctattaatatttaacagatcctcagtccaaatgcctagatgcttaaatatccataagttgtacttttagccataatgcttcactctttcctttttaatttgaaggttatacattattgctttaccaaaagacaatgaagcaaaatagcctaataacataaatttaataaactgtatcagagcagaaatggagagatagcttagcttccagttaattggaccacagtctcgtactagatcatcagaaactactgtttttcagcattttaaaacatgcatctttagtctcccctgaaattatcctctttgccagttcaaaatctttatgtccatatacggttatttttgaaatcgtaagtcatatgtctgttcatcccctttcctataaagctcattatctaaacattgtctcacacttcaaaggatcacctgttgatgtgaatggatttaccagtggaactcaggcaagagattccaggctgtgagcgttactgtttttgtaaagggaaggtaacttttatatatagtttgcctgcctttggacagtcttgtttctaccttctaaaatacgataattgaaagcacagcgttcctatggcttgctgatagattgtgagaaataacagcaaaatatatacagctgaggagattgcatcaatacatctctgcaccgaaattatggcagtgatttgcctagaattgggggctattagatcaaagattgtcctaaagtttaaagttacattcaaccaaacacatggacaatttttgttaatatcatattagaccagatttaccagttgttttctaaaatttaatatacattttttaaccattttaggttacagaaaaagcagaaagtatagagagttttcatataacatcctctttcacgagtttcctctagttttaacatcttgcattagcatggtacatttgtaacagttgaggagccgatactgacatgtgatcgttaactaaaatccatagcttacattagggttccctcttttttgggtgtaagttctgtggattttgacaaaggtataaatgatgtgtcaatcattacagtatcatgcagaatacttttactgccctaaaagtctccgtgttccgcctgttcatttctcctcccctgtattcctggcatcaaccagccactttgatgtcatatcaactcttataccctcataacgtgttttttattgtcatcattgttttgtttttgtttttctgttaatgacgtatggctgtgacaaggtaatgagaccagcggctgttgttggaggaccttttttcttaattcctggttacttatccttgaattatgtgacaagctgataaatccaataaccatggattttccattgtttcaacctgccaatacttctctcaagcttgtatatccaagaaaatataaaaaatagtagagcagaaaattacaagcttccatacttatcctactctccctgtgtccccatccccacttctggtggctttccaactcagttaagtcctgtacttagccagttggtgaccacacaatgtgacatgttttatatccaagtcagtctcagactaggtgagttttttatgtggcagattactgcttagtttatactcagacaaaaaggaaaaaattaaacatataaacacccttttttttttttcgagagtctcatgctgttgcccaggctagagtgcagtggcgtgatctcagctcactgcatcctctgcctcccgggttccagcgattctcctgcctcagcctcctgagtaactgggattacaagcacgtgccaccacacctggctaatttgtatatttttagtagagatggggtttcgccatattggccaggcttgtctcaaactcctgacctcaggtgatctgcccatctcgacctcccaaaatgctgggattacaggcgtaagccaccgtgcccagcctaaacccatgttttaaattaatgcaatgattgtattagcctttcaaacattaagactggcaaaattgttacaactatggagttttcattgattcatcctactcaccatcttttcctttaatatctgaacaaaccccaactctgttcactgttctccctgtgagtagactaatggaacaagagcaaacagtaacacaaacagacgctaacacaagttcatgcagaatcaataaaaatcagtacaacagaagataagtctatgtgtttttgatacatacgattaagcatgtgcctttttaacaatttatataaaacctaaaatatatgtatttctgatttttacctgtagtactgaagaagttacttaataacgttgaatataaaggccacttttacttaaccaccttccattcactattaactgctgtttccaaagtgtaagcaaatcagtctctgtgtacatagtcaagtgtatacaagcgtcaggcgtaacaaactcaagatgaacatgacagttcaaagatatttgggacaaaattgttgaagcatttttacccagggctctgtagctctgacaatgaaagaatatagttgctcttccagctgctattcagacagaaagcttgggcaagaagggtctgtatctatgttcttcataatacaattacaagtttgaacttcagataacatcagcagttggcatgtggaaaaccaaaaccctattttggtatttatcaagattgttaatggagtcaggtttcccttatttgtttctttaatggggtacagaacatcctgttggataacccgctgagtgacatgacgatgctctgaaggaatgcatgagagcttgtggtacctgccttgaaacatgggtttcactaatgctggtggctcacacttcccattgaacaagactagagataggaaggctatttgagggacacagctatggaaccataggtgccacatggtaagccaaatttttatttgttgtgttgttgtgaaaaaccttattaaaagagcttccaatgagagtacttgattaataacacagttcgtatctatagaaataatttgcttttcaagaaaatcatcatgtgctacagttgaattgacattaatgttatcattcattttgaatgatctgtgaagtattttaagagagatctggggaagtaaatcaataagtagtttaacataaatcaaggtgcagttaatttttttcaattagaaatatattacaaagattctgtcatttccaacaacgtgaaataacctggaggaaattgtgctgagtgaaataagccagacacagaaagatgcatattactgatctcccttatatatggaatctagaaaagtagaattcatagatacagaatagaagagtggtcaccacggtcttgggggtgggggacatggggaaatgttagagtgtgacaacttgcagttacaaggtgaatatgctctggagacctaacgtatagtacagcatagttactctactcaatagtattctcactgcaccccccaactcccccacacacacagtaactctttgaggtgtggatatgttaattagcttgattttggtaatcatttcacagtgtatacatataccaaaacatcactttgtataccttatatatgtacaatatttatcaatcatacttcaataaagctggaaaaatgcatgaatattatatatatgtatatgtatatacaaatgtataagagattatagcagattatagctctttgaaaaagaataacatttcagcccagttctgactaagaccaaacaaaaggtgatagcatgttttagttccttaaatgtggatttgaggagtcaagaaatctccaagtgtaggaaaacctccgtggcaaagagtgtagaatatgagaatcacaaaaatagcatgcacaaaatagcctgctgtgatgttgaaagtataagagctagtaattattattattattattatttttatttttattattatactttaagttttagggtacatgtgcacattgtgcaggttagttacatatgtatacatgtgccatgctggtgtgctgcacccactaacttgtcatctaccattaggtatatctcccaatgctatccctccccctccctccaccccacaacagtccccagagtgtgatgttccccttcctgtgtccatgtgatctcattgttcaattcccacctatgagtgagaatatgcggtgtttggttttttgttcttgtgatagtttactgagaatgatgacttccaatttcatccatgtccctacaaaggacatgaactcatcattttttatggctgcatagtattccatggtgtatatgtgccacattttcttaatccagtctatcattgttggacatttgggttggttccaagtctttgctatcgtgaataatgccgcaataaacatacgtgtgcatgtgtctttatagcagcatgatttatagttctttgggtatatacccagtaatgggatggctgggtcaaatggtatttccagttctagatccctgaggaatcgccacactgacttccacaatggttgaactagtttacagtcccaccaacagtgtaaaagtgttcctatttctccacatcctctccagcacctgttgtttcctgacttttgaatgattgccattctacgtggtgtgagatggtatctcattgtagttttgatttgcatttctctgatgaccagtgatggtgagcattttttcatgtgttttttggctgcataaatgtcttcttttgagaagtgtctgttcatgtccttcgcccactttttgatggggttgtttgtttttttcttgtaaatttgtttgagttcattgtagattctggatattagccctttgtcagatgagtaggttgtgaaaattttctcccattttgtaggttgcctgttcactctgatggtagtttcttttgctgtgcagaagctctttagtttaattagatcccatttatcaattttgtcttttgttgccattgcttttggtgttttagacgtgaagtccttgcccatgcctatgtcctgaatggtaatgcctaggttttcttctagggtttttatggttttaggtctaacgtttaagtctttaatccatcttgaactgatttttgtataaggtgtaaggaagggatccagtttcagctttctacatatggctagccagttttcccagcaccatttattaaatagggcatcctttccccattgcttgtttttctcaggtttgtcaaagatcagattgttgtagatatgcggcgttatttctgagggctctgttctgttccattgatctatatctctgttttgaaccagtaccatgctgttttggttactgtagccttgtggtatagtttgaagtcaggtagggtgatgcctccagctttgttcttttggcttagggttgacttggtgatgcaggctcttttttggttccatatgaactttaaagtagttttttccagttctgtgaagaaagtcattggtagcttgatggggatggcattgaatctgtaaattaccttgggcagtatggccattttcacgatattgattcttcctacccatgagcatggaatgttcttccatttgtttgtatcctcttttatttccttgagcagtggtttgtagttctccttgaagaggtccttcacatcccttgtaagttggattcctaggtattttattctctttgaagcaattgtgaatgggagttcactcatgatttggctctctgtttgtctgttgttggtgtataagagtgcttgtgatttttgtacattgattttgtatctggagactttgctgaagttgcttatcagcttaaggagatttttggctgagacaatggggttttctagatatacaatcatgttgtctgcaaacagggacaatttgacttcctcttttcctaattgaataccctttatttccttctcctgcctaattgccctggccagaacttccaacactatgttgaatagtagtggtgagagagggcatccctgtcttgtgccagttttcaaagggaatgcttccagtttttgcccattcagtatgatattggctgtgggtttgtcatagatagctcttattattttgaaatatgtcccatcaatacctaatttattgagagtttttagcatgaagggttgttgaattttgtcaaaggctttttctgcatctattgagataatcatgtggtttttgtctttggctctgtttatatgctggattacatttatttattgatttgcatatattgaaccagtcttgcatcccagggatgaagcccgcttgatcatggtggataagctttttgatgtgctgctggattcgttttgccagtattttattgaggatttttgcatcaatgttcatcaaggatattggtctaaaattctctttttttgttgtgtctctgcctggctttcatatcagaatgatgctggcctcataaaatgagttagggaggattccctctttttctattgattggaatagtttcagaaggaatggtaccagttcctccttgtacctctggtagaattgggctgtgaatccgtctggtcctggactctttttggttggtaagctattgattattgccacaatttcagatcctgttattggtctattcagagattcaacttcttcctggtttagtcttgggagagtgtatgtgtcgaggaatttattcatttcttctagattttctagtttatttgcatagaggtgtttgtagtattctctgatggtagtttgtatttctgtgggatcggtggtgatatcccctttatcattttttattgcgtctatttgattcttctctctttttttctttattagtcttgctagcagtctatcaattttgttgatcccttcaaaaaaccagctcctggattcattaatttttgaagggttttttgtgtctctatttccttcagttctgctctgattttagttatttcttgccttctgctagcttttgaatgtgtttgctcttgcttttctagttcttttaattgtgatgttagggtgtcaattttggatctttcctgctttctcttgtgggcatttagtgctataaatttccctctacacactgctttgaatgcgtcccagagattctggtatgttgtgtctttgttctcgttggtttcaaagaacatctttatttctgccttcatttcgttacgtacccagtagtcattcaggagcaggttgttcagtttccatgtagttgagcagttttgagtgagattcttaatcctgagttctagtttgattgcactgtggtctgagagatagtttgttataatttctgttcttttacatttgctgaggagagctttacttccaagtatgtggtcaattttggaataggtgtggtgtggtgctgaaaaaaatatatattccattgatttggggtggagagttctgtagatgtctattaggtccgcttggtgcagaactgagttcaattcctgcgtatccttgttgactttctgtctcgttgatctgtctaatgttgacagtgggtgttaaagtctcccattattaatgtgtgggagtctaagtctctttgtaggtcactcaggacttgctttatgaatcttggtgctcctgtattgggtgcatatatatttaggatagttagctcttcttgttgaattgatccctttacgattatgtaatggccttttttgtctcttttgatctttgttggtttaaagtctgttttatcagagactaggattacaacccctgcctttttttgttttccatttgcttggtagatcttcctccatccttttattttgagcctatgtgtgtctctgcacgtgagatgggtttcctgaatacagcacactgatgggtcttgactctttatccaatttgccagtctgtgtcttttaattggagcatttagtccattgacatttaaagttaatattgttatgtgtgaatttgatcctgtcattatgatgttagctggttattttgctcattagttgatgcagtttcttcctagtctcgatggtctttacattttggcatgattttgcagcggctggtaccagttgttcctttccatatttagcgcttccttcaggagctcttttagggcaggcctggtggtgacaaaatctctcagcatttgcttgtctgtaaagtattttatttctccttcacttatatgaagcttattttggctggatatgaaattctgggttgaaaattcttttctttaagaatgttgaatattggcccccactctcttctggcttgtagggtttctgccgagagatcctctgttagtctgatgggcttccctttgagggtaaccagacctttctctctggctgcccttaacattttttccttcatttcaactttggtgaatctgacagttatgtgtcttggagttgctcttctcgaggagtatctttgtggcattctctgtatttcctgaatctgaacgttggcctgccttgctagattggggaagttctcctggataatatcctgcagagtgttttccaacttggttccattctccccatcactttcaggtacaccaatcagacatagatttggtcttttcacatagtcccatatttcttggaggctttgctcatttctttttattcttttttctctaaacttcccttctcgcttcatttcattcatttcatcttccattgctgatactctttcttccagttgattgcatcggctcctgaggcttctgcattcttcacgtagttctcgagccttggttttcagctccatcagctcctttaagcacttctctgtattggttattctagttatacattcttctaaatttttttcaaagttttcaacttctttgcctttggtttgaatgtcctcctgtagctcagagtaatttgatcgtctgaagccttcttctcgcagctcgtcaaagttattctccatccagctttgttccattgctggtaaggaactgtgtttctttggaggaggagaggcactctgctttttagactttccagtttttctgttctgttttttccccatctttgtggttttatcgacttttggtctttgatgatggtgatgtacagatgggttttcggtgtggatgtcctttctgtttgttagttttccttctaacagacaggaccctcagctgcaggtctgttggaataccctgctgtgtgaggtgtcagtgtgcccctgctggggggtgcctcccagttaggctgctcgggggtcaggggtcagggacccacttgaggaagcagtctgcccgttctcagatctccagctgcgtgctgggagaaccactgctctcttcaaagctgtcagacagggacatttaagtctgcagaagttacttctgtctttttgtttgtctgtgccctgcccccagaggtggagcctacagaggcaggcaggcctccttgagctgtggtgggctccacccagttcgagcttcccggctgctttgtttacctaatcaagcctgggcaatggcgggcgtccctcccccagcctcattgccgccttgcagtttgatctcagactgctgtgctagcaatcagcgagactccgtgggcgtaggaccctcgagccaggtgcgggtataatctcgtggtgtgccgttttttgttttttttttgtttgtttgtttgtttgtttttgagacggagtctcgctctgtcgcccaggctggagtgcagtggcgggatctcggctcactgcaagctccgcctgccgggttcacgccattctcctgcctcagcctcccaagtagctgggactacaggcgcccgccactacgcccggctaattttttgtatttttagtagagacggggtttcaccgttttagccgggatggtctcgatctcctgacctcgtgatccgcccgcctcggcctcccaaagtgctgggattacaggcgtgagccaccgcgccgggccggtgcgccgttttttaagcccgtcggaaaagcgcagtattcgggtgggagtgacccgattttccaggtgctgcccctcacccctttctttgactaggaaagggaactccctgaccacttgtgcttcccaagtgaggcaatgcctcgccctgcttcggctcgcgcacggtgcgtgcacccactgacctgcgcccactgtctggcactccctagtgagatgaacccggtacctcagatggaaatgcagaaatcacccgtcttctgcgttgctcaggctgggagctgtagaccggagctgttcctatttggccatcttggctcctccccaagagctggtaattattacccaacgtttagaatataatgtaacagaacgtatttggaatacatttatcttttaatatttcaaaggagagataaatgcaaactaagattttatttatcattaaattcattgttctttagtttgaaaaacacatatactcatatttttgtcacgtgattttaaccagcataaagcaatagctgccacaccaaagtcaagtgaagctgtgaaaataattaatgaaacaattctgataaaagcatctttatccttcatacaggttataggcaggattgtggttgtgcctgtgtgtgtgtgtggtggggtcggtggggggataggaaagttagtttattcacatgattctcaacatagacataccttgcaaataattgtgcaattccctgctttgctttgcagacagaatgtctttgaatcaatgtcttttataaatacactatacaaaaaacataattataaacctttaaagtatttatgcatactttaatattcagaactagaagagaaatttctgtaaggagaaatgctttggagattaaaacgtaaaggagataaccaaattttactaaacctctatccatcatgaccacatttcctttcattctaaaataaaaatattttggaaatgttgaccccctgcccaccatttttgcctgagaagttttaaatgcgaagaacttgctcctcacttttgaagcacggtgctttctttaggaaccaatctgtatcacatgcattctattggtttgtattttattacatatcattctattacattttaaaatgcatttctgagcccatgtcattgatttcatgattcattaatgggttgcaagcagcagctggaataacactggcttaggtaatggcagtataaatcacatgttggtaaaatgaaagatgcctttctaccaacacgttataatggccactcgatgccaacatggcagtgtgttacttaaaccatatatcaatcaacacagaagcgacataaccaaaatgtttttaccatcatttatagaagattatgagtttcatgcagccaggattaattgcattgctattatagaacttaatataagttgtatcatatttgatggaaggatgctaactatcaagaggatataaattttaaaaacaatgatactgttttggataagtcctgactgtctgcattttatctagaacaatatatgttcatgattaacctagaaaataatgacaaaaatgcgcaatgagtagagacttgcccttggaattcctaaaattattaggaaggtacaatgttctccaagaaatattggtaagtgaaaaaaacaaggtttacaataatgtgtaacggatgctatctgtgtaacaaaatgtgaaaaaacatatatgcaattttttggcaagaagataccctgaaaacataaaccaaaaagccaaaaaaaaaaaaagaaacttgctgatgatacagaacttctctgactgtacatttttctcatagtcttaactctgataattacatacatgtttgacattctcaaaagtaagaacatagaagtacataatatatgcaggataaagcaaataacagtttatgtgaagattgttagaagccaaggttttcatggaagttattagtatgaagtcaaagtagtacattaaaatccagtaatgttaattggatttggaagtaacagtatgaaattttttctctaaaaatgtgtgcaggaatctcttgcttaagatcagtaatctattcccaaaaatagattttgagagcacatttctgttctaaatgggaacaattatagtgaatggaaggtaaaccaaaacatagctatttcctacaaaataattgatacctaataatgcctgtagaaaagcatagaaaagtgacaaactctcttgataaaatctaaaatgtatattgtttcctaatcagcaattattgatgttgctaacatacagttgctttgtatctagttacatggaccgtgtatatgctgtatgagaaattgtcactttgtggtatagcatagcaaataacacagcaatcaaaaagttaaaagtcaaaattaaaataaataaaagacccataatagactgtttttcaccttgctaaaggagaaatgactcttgaagaaactcaagaagggacaaagaaaggtcaaatcagtcattgctatttgcagaaggtgatgggtggatggaggacaagggggcaatcttcgacaaactgtcatatgaagaggaatgaagagaccttccccatgtctgtgtctagtagatgctgtagagacttgctggacaggaaagctttggtaaatcttcagaaatgatgttcaagctgaaggaagatgttcaagctgcattttggttgcaaaatgcagatttgcttgtttttctgttgaaaaattcctctatgtgatgctgtaagagttaccaggctattattaaaagaaagatgtattgtcacactgagtatgtctgcaaaactttcttagtaactggcctgtttgtttatactcaatgcacatgttaagatggctacataggattcttactatgttctatcaatttggaatgtaactcaacattcttccagcacataaagttgtttacaatatataatgagtgtgaaagatataaataaatacttctatttgatgtctacaccaacattagatgaaaaaatgaggtagtgagaagttgatatatatcctgtaaattagcatatttaaaaccaaaaatccttctactgggtaaatattaactaggaaaacattctacaggatataatgcatttttctagctctgccccctgaaaaggtctagtagtaatgtgatctgatggcactaaacacttctgatctcaaatgatagcctctaaaatgctgttttccaacaaagagaattagggctcctgaagaaatggctgatgccaggtgtggaggagaaaatgagcaagctgagcttgtgatatatgttcaccccagagagggctcatgtcacgtgggcaccaacagagaggggtctcaggtagcaacagtggggccattggaccatcaaaggagcaattagggtacttgactgaagcctgtaggttcataatttttactctaaaacaaggaaggaaggtgggaagaaaggggaaaggaggggaagggaaggaagaaaggagggagggagggaaggaaggaagtaaagagctagaacaacaatgaaacaaaatatctttgataactttttgggggagtacagagtggaaattttgcatttctggaggctttacaagatggggatctgtgcttcagaaataagtcagtaaagatacatttacatagatgtttcctccagtattgcttggaaaagccaaaatcaaagtgatgtagatagttacctaagagatgaataaaataaataatggtacatcttttgtatggaatattacatagccactaaaaataatggagcagaactctactcaatgacatataaaaatgtccatgatatattgtataatggaaaaaaattttaaagcaaaaggttttaccttatttatttcacaagctaaaaccctatatgattatacaaaccaatgtgtttgccttaaaaagataaaagtctggtgtcctctaagaccataccacaaacagtgatcacctctgggattggaattttatagcagttgtgggtagagagagtttgggagaaaacattcacattttatctcataattcttatatttttaaagcttttctatgagcattattttgatacatatgtgagcagagatggtcccttctaggtaccagttacaccattgctaaacctcgtctgtttcttccaaaggtgtcaggcagcgaacaagacctgccccaccaattacatgtggaataatcacatctgcagatgcctggctcaggaagattttatgttttcctcggatgctggagatggtaagcagaatgatgctttaaagactaaacgccaggggtctatattgtgattaacatactctaatattaaaaccacacatataatattcatcattcttctaaataagtgactaaaaaatagtacattttctacttcacgttggtattattttgaactcctttataaaggaacatactcatgtttgtacccaatcctttgatggaaaacatacaaaaggaagatgcttttaaaagcttttgtttcatgccacacccagaaccaagtaaggtatagtaaagattctctgactatttgtctagactcaacagatggattccatgacatctgtggaccaaacaaggagctggatgaagagacctgtcagtgtgtctgcagagcggggcttcggcctgccagctgtggaccccacaaagaactagacagaaactcatgccagtgtgtctgtaaaaacaaactcttccccagccaatgtggggccaaccgagaatttgatgaaaacacatgccagtgtgtatgtaaaagaacctgccccagaaatcaacccctaaatcctggaaaatgtgcctgtgaatgtacagaaagtccacagaaatgcttgttaaaaggaaagaagttccaccaccaaacatgcaggtaagagatcctcatgaagaatattaatttatcttactagaaatatgctctaaaccaaaagcagttttcttaaccaaagtaacaattgcttgttagaatgaggccaatacattctgaaagacaaaaatcttatatttttttaaccaatgctaaacttgcatgagactggatttgcttccaaaaaagcaagacaggagccttgaggatcaaaattagatccaagctcagaatatactctaaattagtggttcctgtgggatgttttcaaaatacctaaaggcaatccacttcacccccaccaaaaagtaggatgccttcagacataatttaggacaactgttctaaatgcagacaatttttatgcaaaacttacaaacaaaggacaggagagtaccactggtatagaattatatctggaaatgaaaatacatagctaagtatttgatagaattagagaaataaatgaatatgttgttaaaggtacccaagactcatgtcttaaacttggttttgactcttctgcatcaagaaaaaaaaaatgaagttattcgactcaagcacattcagtgttaatcccgaaacctcttcctctttaatctcagagaataaattgatcctactatttaagccagacctgtccgtttgacattttctccacattccttcaacattgcttcatgccattccttctttcttctgtaacttgaacatcttcaactctactttttttccccttagtttataaaagttcccaaatttcttctattttattagcctcttactgtgaagttgagcaaactttagcaacccaggtctgttctcttcaaagctgctcaaaaacgaggcatttgttttcacctctttcacctaccatgtattcaaccaactaaaacctggtttatggcctacagtgctatgttaaacctctgtttaacgtttcattggcctcatagttgccaaatccaacagagaattttgtccttaggtaacctgtcctttccatggcctttttctttaagctcacctcttctatgacatgacattgtactttcctagttgtctacttaattttcagaccatttgtttttaatcactttcactggattctctttttacatccattctttacatatgggtagataatgttctttttaacagaaaaaagcttgtatttcatttatttactatcttcactaatgttcattattatttttccacagtatataacgagttcatctttttattctcaagagttttgtgtccttattttaatgtatatttttggtggttttcctaaactaatattttagctactggataaaaaggctttagtggatctggctatctcattgattatatttttcttcccttatactgcaaagtacatcataggtataattttattttgagaaagaactatattccaattttacctatatattcctactgtaataaccaagaggacatttcaaaaatgtatatgctactattttcagaaggatatagatactaaatctttttaagccttattaaactatgttttatattgaattcttattgagtgaatttagtatacattgaaaaatctgaaattcttatgtctgcatacctacttttctacagaattatatgaacacagacaatatttctatcattgcatttctcctaatactatacattctttcaaaaagactctgtttactgcaactcatcctagattcatttttctaagtgtataattccaagctttgtgatataaattggagcaaaagagaaaatatcatattttgaaaatatatattctcctcattctctcttaatatctattacaaagtgcagtaggcagagtatatattctttggttcattgccttaattaacagcttttatggatcattaagtatcatatccctttttagtagaggaataccagtagtcataactatgaatttgcatttgcaaagtttaagaaaaattaactagacatgctttcttttctagagccaaataaatgaaatgtcaaaaccaaattgtgtagggttttttatagcacacttttgatttccacctcaggtcatcttgcacttttccctttacacctattcccacacattaggcatgctcatactccaaaatgtttttaaaagatagctccaattctcaccaggcgtggtggctcacacctgtaatcctagcactttggaaggccaaggcgggcagatcacttgaggccaggagttcaagaccagcccagccaacatggcaaaaccctggctctatgaaaaatacagaaacttagccaggcgtggccacacatacctgtaatcccagctactcgggaggctgagacacaagaatggcttgagcccaggaggcggaggttgcagtaagctgagattgccccactgcgctccagcctgggcgacagaacaagactctgtctcaaaaaatgaagcctcaattcactggagcaacagggcaggagacacactgaccaattgataatttgtcctctcaccgctactggaaactggaagtctaggatgggaggaaggggaccctcgctgctgagtattgtccttctcacctccctgccccagaatgcctctgtttcacctggagccaaggtggaaaggaagagttagtcaccgtcatgcagccagctgccaagtagagacacaagagtgagggtggggctgctcactgaggaccacagttctgccaacatggctgggtttaattgcctggaagtctgggtcccatacaagtcccagactcatgtgaattctgccatgcttatgtgatcacagtaagtcagcagaccttcagtgttcactttcagaatttctgttttatgtttctttcacccatgaagcaaagagcacttcaaaggaactaatgcttacaatacctcatccttccatttgttatatcagcaagcaagacttttattttaaggcttttccattcctcttaaatgttgtaattctaagcagaaacaaacttttttaaacctatgaacaatttcgtcataaaattagtaattttattccagtctgaaatttaaaaacacagaaataccttggtagcatgatgaatccattgccttgatctttaacgtaagtgtgttcttgtttgttctcctagctgttacagacggccatgtacgaaccgccagaaggcttgtgagccaggattttcatatagtgaagaagtgtgtcgttgtgtcccttcatattggaaaagaccacaaatgagctaagattgtactgttttccagttcatcgattttctattatggaaaactgtgttgccacagtagaactgtctgtgaacagagagacccttgtgggtccatgctaacaaagacaaaagtctgtctttcctgaaccatgtggataactttacagaaatggactggagctcatctgcaaaaggcctcttgtaaagactggttttctgccaatgaccaaacagccaagattttcctcttgtgatttctttaaaagaatgactatataatttatttccactaaaaatattgtttctgcattcatttttatagcaacaacaattggtaaaactcactgtgatcaatatttttatatcatgcaaaatatgtttaaaataaaatgaaaattgtattataagctg

SEQ ID NO: 83 - DNA, 38823 bp, Homo sapiens
  source 1..38823: mol_type = other DNA
aagacacatgcttctgcaagcttccatgaaggttgtgcaaaaaagtttcaatccagagttgggttccagctttctgtagctgtaagcattggtggccacaccacctccttacaaagcaactagaacctgcggcatacattggagagatttttttaattttctggacatgaagtaaatttagagtgctttctaatttcaggtagaagacatgtccaccttctgattatttttggagaacattttgatttttttcatctctctctccccacccctaagattgtgcaaaaaaagcgtaccttgcctaattgaaataatttcattggattttgatcagaactgattatttggttttctgtgtgaagttttgaggtttcaaactttccttctggagaatgccttttgaaacaattttctctagctgcctgatgtcaactgcttagtaatcagtggatattgaaatattcaaaatgtacagagagtgggtagtggtgaatgttttcatgatgttgtacgtccagctggtgcagggctccagtaatgaacatggaccagtgaaggtaggtgagctcaatttttaatgtgatgaagttctttttattggctcatacagaggactttctttgccctcactatttttgaaacaatataaaaatgcagaaccatcctagtagtggactggacaggatatatcctgcatttcttggtgactgttctgtttcttagtcttattaaacttctggccatgagtatttgaaaatgctggggtgggggttggttgttttttgaagttatggtagaacatgagcagtctggaatctttttggatggagaagtttctcctcggttgcatatgcagatggcacagtggttttttaatgaaacattgatttgtttttatgactgataactttgtgggccatttattttcaggtctttgtgagcagcagaggttagtttattcgtttggtaaattgaaaattgcagtgctttctatgaacattttctatctgcttttgcaaattaccaattgctgccatccagaaaaatgttttctcagagagtgtttggttttttcgcttcttgaaaggtgtaaaattcaacactaatcaaatctttggttctgtgagcaagcatcaaatagagcttaacgaacagagagtaatgcaaaaaattaaccagaatgttgctgactgctggaacaatacttagcccaattttatgcatttcatggattatatatattttaagcttctattttgaaaatgattcggatgtaattgttttgactgaagtggtgctaaatcattattgatttaggaacttctggccttgaaaagacaattaaatgtgagtttgagtttttgtagctgttgtttaggacgtgcattttcaacaggggtgatatcgcccccagcaggggaaaattggttcgtggagggatgaaaaagttttacccttttgatacatcacgcacagacgtacatacagtacatatggtatgtagtttaaaatacgttatacattcaaattgcatagggggaaagtgtcttcaaaggctcctggctggtgttggtggcctggcgagggtgggggctgatatttaaaaatgttgaacactgagctggaggtgagtgggaagtcaccttgtctggcagccagcacttttctaacttctcaaattccaaatttacatgggagaaatcacagtgtttggctccattttactgccaccagccttgatattggatctcaaggccagattgtaggtaaatgggaatctgactgtaagcataggtaacaggagaaaacggtctgacttgtttgaagcaagtaagacttttccgactgtccagctttttcgtaagttcatgaaacagaaatcctttagatgtgctgggctcctcgagttttaaaatatttccattttccttgtaaaacatcactttatctgatggtataataaaggagactgaattgttggacataagtcatattctttaggttgctcagctctttcaaagagcacaagcaccaagaatgtctcaggtgtcctgggcactgtgaagttttatttatttatttatttatttatttgagacggagtctcactctgtcacccaggctggagtgtagtgatgcaatctcagctcgctgcaacctctgcctcccgggttcaagtgattcccctgcctcagcctctcgagtagctggaattataggcacgtgccaccatgccgggctaattttttgtatttttagtagagacagggtttcactgtgttagccaggatggtctcgatctcctgacctgatgatctgcccgccttggcctcccatagtgctgggattacaggcgtgagccaccgcgcccggctggcactgtgaagttttaaatgctttgaatgtactgttaatatataaatttgttgaatggagtaacgaaggaaagcagctgaatttgcatgtgacagaaaacaagttgttacacgtggaggatgcagcattatatacttactaatacgattagcaattttttttcagaatatatcagaatttcctttaaaaagtgaagctacatatactgaacttatatccaccctacccctcgctcaattaaattatttctgatatgaaggaaaggattgcctatagctaaacagaagttttggcatagatatgactgagtggtaagggataatgagatatataatattggttatagttttcttttttccccaacttttaagaaaagaaaatctaagaggaaataatgtttctaaatgttaaagttcttcttgttaaaattaaaatgtagtgtgaaaacatattcatggtggtaatggtttagggtggtggtatttgaattttttgtttttttttttttactttttgaaataaaatgttttatttattataagaaattcatggtcttcctcggtacttggtccatatgtatttctttctcctcaccctcccctcttctaaccacctcttttccagaatggatggtgatgccaattttgctcctaggttgtcctccagccacccccagcccagttttcactttctagctttgaagattgtccagttttccagcttagactagcattgcctctacgatagttctaggtatctgtgaagatttttttttttcctgtagcaatcatgaaatagctactagtgctctggacgattgtgcttaatgccatttgggtgtaaggcctcctaatttcattagtcttaccacttgtgtttgcaaggatagctgtttggagtcagcagtgcatggaacatgtgaactgagacaaatctgtttgaaaatctcaacttaagatttcaaatccactgtgtatactatttagctgttaagtttctcagtctaagaagaacacgttttcctctagaaataagcttaacccagtacctatgcatcgttcattaatataatcagattacggcctagatgtggaatttatttctgtttctattttctccagctttttaatacagctcagacagtcatatacagttgtacacgatgtgcactgcacaactctagggtgctccatgcatatagacatatctgtatgtgacagccctaagtacaatgtggtagacactctggacatttggtaaataagtatctacatcctcactcttctctcattcacattggccttctggccagcactatttctggtttatttaataaacaattcttgtcccccagaaattctgtgagtcttctgaagatgctggggaaagccagccttcataaatcttttcaatgtcactaatgaagacatgtcactattgcaacaaaggaataccaggccatagtaggctttcacaacttttttctgacagaatttgtttctttctgctttatcttccctgtgtactgtctttttttatccaccctctttcttaattacactggtagaagaatattggtgggtgatggagtcattcacattctgtgtaagactagaatcagtccaagatccacaggaatgtgggatacttctttcatgagaagccacatggctcacaagacttctttacatttgtgttacttgccttctcctgaaattgtctctacagtgaatcaaataacaaggactgaggtgtattttccatatttaattccaggaagcagtcccactccttctccctgcccgatttccagttccaaagtcatgtacagggaagtccattgactttgatgttggtcaaatggcccagcaagcttttgtccacttttctgtcagacacagtccttggcacaaaagacatctgaaatacttcccattaatttcttctttatttatgaccttgtagttaagtgtgttgaattatatgcttctatacacatctgttttaatccagttactcacttataactggtgactgaaacttttatatcactatagcgtattattggtacccaggatacaatagaatcctcaatatcttacatcttcaatatagtacttccttgtatgacttatttcttaacataaaaatcctgttttagacctgtggataaacctttactataaatcccagagacaatttctggaatgagaatatagtatttgtccacacacatgattccatgtagaacttgaggtaataagatctgggactcccagatacatttattattaccacaattggatagaggtgctacagaaataggcacacaaatgacagtaaaattgtttctgagaacatttctaggctcaacttttttctacaacttaggatgaacagagagagtggaaactgtatataattgggaatgtgactgagatgagacaaagatgacatggaagcatttcttcttcccttgcttttctggtggtaagttcactcttctgtcttccttgccactagttcttgcagtccctaccaagacactagggcattatacagcaaacacaccctgaggccccctgctactgcatcatgaaagccttagctggttgtgatgtcctagttcataaagaatctgcctagtctctcattagagctttccaatatttgacaattcattcatttatttttttcaacaggtatttattgggcaccaatatatctaggcattgatctaggggctgggaatgaagcaggaaataagtctaggggctgggaatgcagcaggaaataagacaatgtttcaattctcttggaatttgcattccaagtgtgatgggtagaggcagacaatatgcaaatgtgtaacatgtcaggtgtgataaatgctatgaagaaaatcaagtagggggagcggatacagtactgaataaatcagaggagacctttctgattcagttatgtctctacagagtcctgaaggtaataagagagacagaggcaaccatcagtgcagtggccatggtgggcgcagcaagttggcttcgatgtctgggtattagccagggagccggtgcagctggaggtggggtgagtggaggccagaagtgcagttgttgaggttggagaagtagccagagaagatcatgtaaggtgtgactgtgctcccataaaactttatggacactaaaaattgaattttatgtaattttcctgcatcatgaaattaaaaaaaaaattgtttcaaccattggaaaatgtaaaaaattgttcttagctaacaggccatacaaaaacaggctgcaggttagatttggcccatgggtcatagtttggcaattgtgttatatataaattattacactgttttatcttcatcatggtacacatccatacctgacatgttttatttgcctgtgtatacatttattgctttgtcaccgtctactagaatacaagttttttgagaaaaggagctcttaattgtcttgtttactgcagcatcccaatcaccagtgaaaagcctgtatgtaatagagtagatactaaaaacagtatttgttgactgattgatggactagacctcaggatttttagatacccaggatcaggatatgaactactgcattaaatcatctccaacatctactctcatgatggcttgtctgacttcatgatttaaaaaaaattctaaagcatttttaaggcagtatattcaccctgtgctattttcctgtgggcataggatagggtttgtgtggatgtatcaaagacttctccactgtccttccaggcacaagccatcctataaggcgttcccttttaggagccagaggtatagaaggaagtcatctgagcccattattccagcctgttggtaacagaaagagagatgagcaaagtagcatttggctgcacaggggtctggacaaaacttcaacatcttgatgttttccttcatccctgagagccttagaaatgctacctatgctttcattttatgttaggttgtttgtaaaatcatggtaaattatggcaaaatactctggtcagatactttatcaggttaggccaggatatgctgtgaaaacaaacacccccgaaatcttggtggttcataaacaacagagacttatttattgcttataccacatgaccagcctggttcatctggggtcaaatccacatggggatgaagctggctgagtatccgatcttgaatgttaggaatcactatgacagagggagggagagcctgagagcgcctcaccctggcacttaaattctctggcccagaagtgacacatattacttctagttgcagccccttgacccactgccccatctagccacaaagggccaggaagtgcaatcccaccatgcgctcagaaggcagagagatggaaatatttgacaaaccgtattaatgactgtgacacatggtgagttcttcacattggtgacttctaagtgcttctgaacacacctttgactgtagaatgtcaaaaacattctcaattttacagcagtgctggaaaatgaattgtattgagacaacttgggaggagtagaaggagatggaataaaaaaaattcactgatttctgtcatgtgtcatgcctcctttaatgcacggaagaacgtatactttgcttaggaaatcacattaccacattcagaacaactttagtgaagatgggaaacaaccatggctggtcaatggggtaacgtgtgctgaaggaagacaggtttatttctcaggaggcatcttctccctgggaaaaggaaagacacatattcatctcagtaaatatttgtggaatgtctaccatgtgccaggcatatgagtggaaatgatgtttttataaaataaagatgtcttaagtatttgcatgtcttactaacagtcagggagttcaacttggccagtgggaaggataattttatgcctgaaactttagtaatgtaaatttttatgctgattctctttttgtcattcactgagtattcctaagtaactataacactcacatattggagataagtattggtttcctgaaatctaggtttggctaacattgcttctggaaagagaaaataacatgtgttgaatgtccctatggcaaattcttgctgttacttactgttccattatggagagtgttagaaagagtgtaattttgattgaatgaatatgctaaaaaaaacaccctaaataagaaactcacaaaaagaacagagtggaatgaaaaagtgaaaacaactttgcaatggtgtgcttcgtttataagtacattgtcacagcaagactagggatgattgggcatcttagagagtgcagaggatgttgataaggaagaggaagaggagataagtggattttgatatgggacactagatccttagggaagaaatgtgaaagagggtattctgggctgactgccgctggcatagcaaggctgctttgtagaagggacaataaagttttgcataaggatcctttttcccatccaatggattatgctatactttagctggaatagggctgtagcagttagctattgccacaataatgctgtgtaacaaagcagtccaaatttcagtggcttaaaacatcactaccttattctcacttatgtctccaagtcagctgggagtcagaggattaaggctcaaggcttaggtttggtgcaggtcagccccaggtgtctctcatcctcctttgatcagtgggctagcaggagcatgtgcttgcaatgatggtggaaatagaaaaacgtgcaatcatatgtgagtttcaagcctctccttgcatcatgtcttgtaatgtcctattggtcagtagggctgggaaatatatccctccctcagagagtcaggagtggaaatgaaaatgtttttaacaatagcctaatcaccataaaggctttgggtggcacactgggcccttgatcttggagatcagtgatagactgtaacagacctcagaaaccccttggggttattcagagcatacttctagagggtctggggttgtcttgccattcaagcccatcccacacccatctgcccccacatatcctaagcacagttatgtcaagtgagaacagaggcatttgagtggagcacagatttcaaacacataaaggcagggcatggccatctcccgcagtgctagatgatctggctgggagaaaaccacaagcagtcttcatcaaattggaggatgtggaggtcccaggcatttagtcccctagtatgtccttaaaaaacccagacagccatgcacacacactcacacaaatgcacacgcacacacacatacattcacacacacactcttttcctgcatttgtagttcctttcctcagtctaagtttaattaaacaacttggatttcatatatattcatttaaatatagaattgcataaagaaaagagccaccagaaccaccaatggtagcatgaggcctctgaaatgaaagatgagcccaccccaaccttaaatggccaggtttctggatttcagagaagcaagatcagacccttggcaggttccatctgagcagccacagcagccatagctacagcaataattattagcaagtgtgcgttctccctgccctagttagtacaccctataccatcaggtgtcatctgttctagttaaagtcagaccgtaataacaaaacatcaaaatgtaaaatgtgggttgtttttttctttacacacttctaaagacatttaaagcctgagcagataccttaaaattcatcttctatctgaaaatacctcctagaaccattttaaaaaggagatggaggcaaggtggagagaaaaagtttgtctttggttgacactgggaaagttgtcttttaaaaaattttttaatgtttatttactatggagttgccgtgtcttgctcttttcaagctcacctgtccggcttctaaggaatatcaggggccctaaaacacagacttctaaaccccaacacataggacacacctaagtgtggaaagaaaggaaagaggcaggaaagaaaggaaagaggaaggaaagaaaggaatgcaacatttattgtgtgcctaccatatacctgaccctttcctacatatgaccacatatgatctcttcatgagctttatgaggtgacctattattaacaatgctgctttataaatgaggaaaccaagccttaaggaagtcaaataccatatcctcagtcaaatagctaaaaaaaaaaaaagaaaagaaaaagaaaaggtagtgcctggattcaaagacagcttatttttttaacttatagagtaaaatggattttttcccttttggtgtgtagttctatgaattctaacacatgtatagatttatataaccacaaccataattaggatacggaactattccatcaccccccaaaaattcacttacgttatccttttacagtcagaccttcctcccagcctcccaacctctggcaatcactgatctgttctccttcactgtcgttttgtatttttggttcgctgtcattttggttttttgggaatgtcatataaatggaatcatacagtatgtagcagtttgagattggcttctttcactcatactgcctttgagattctaccagtgtcccagtagttcattcctttttattgctgagtagtattacatcgattgctgaaccgttcacccattgaatgacacataagttgtttctagttttttggctattgtgaataaagctactacaaacattcatgtacatgtatttatgtgaacataaggcttcatttatcaagggtaaaatccccagaagtaggactgttgggtcatatggtgagcatatgtttataagaaactgcaaacacattttccagagtgttataccattcaaagccagttttgaacaattcaaatctatgctttttctttccagtaagctgtttctccagacgacagagtggtttactatattaggcaaagcttcatcttggggaatgttatttccaactgagagctatgggaggcaaagtcacaaaccttcagctcagactcaccaatctaacttgatctgggaagatacctcgacaggtgggggagggagaacatctgctgaggaaggccgggagtggagtgagacattgctacttggaccccaaaaccaggaaaaatttggtggttttggttgagcttgaaccatcaggttaaacaggaaatgcaaaatgctcttccagtgaaacagaagaagctgctaagaggtagagggaacatggaactatttgtattgcaaccgaatccacctccccaaacccactgcaaagggaaattgctgactgcaatgtccctgaactccagggtgagtaagaagagaaccacgccccccagggaacacttgtaaatttttaagcaaatctagggaaagttgtgtaaaatgtgtcccttccataactcaccctaaagcttctgggtattctaaatatacaaattctattcatcacaccgttttatcaccaagcttcctgaaggcatattgccaacacaatttgacaaagaaaatagcaccaacagctttttaaagccttggaaggatagtctcagacccatggctctctagaggtccagggatgaatctagcaaagctggcctccttttccatatatatagaacaagaggattgttaatagcatgggattggaatggctcaagaaaagctttttgaagctctttgagaaaagtagccagggtccccccttaaaccttctttgctgatggccttacagctcaaaaccagcattggaaccggctaggtactcccaaaccaaagcctcttccacttggcatgtatatttatattctcatatcttctttcaaatacctttcagtgttgccttttgaaaagattataatttgtacttttttgttgaattcagtaggttaaagcagtacctattatctttaattttattttgaaaaattggttggtttggcttttggggaatttgagaggcaatttagtctgtcatttaggatggcatcatataaggcagccaacttcatcatgctatttagcctgaaaagcgatattgttgatcttcaaccttgaaaaagtcgtacaggttgggagctgacctgcaaatggtcaggtatcttgagataggaaaaggatttacaaatccaggtcagcaagatactcatacaaatattttgaacccaaggtatacatcaaatagatttaaagactaagactatttctgagcatgcatcgactgtttgaagactagtggacttgtatgaagttcaggagttaacctgggtcttgtaacttaaaaacagcatttctcatgccctaaattagtagtagagagacaatatagagagttcctatatagccctcacctatcttcctctaaggctaacacctgggaagtttttttttaaaaaatcctgatggcaaagctgcagcccagacccaaaaaatgagaatctgtgagatttaagattcgagcatcagtatttctttgaagcttattcccaggtagattcaagaagaagccaagattttgaatgcctgctttattatttttttttttgtgagagctttaatggcacaaaatgtttatagctacaagttatacatgtattgtaaattgtatataacgatacaaagtgctaactaaatagatggagaacgcataaccactttggctcagttaatccaataatttccacaatgggttcatgaaaaacctcatctgactggctaagtcttcaattctcatttttttagaatagtaaatatttttactgcaatcacaggaacttgttgcgctttccaatgtgcaagtttctgcagttttgctcttgattctatttacaaatatcttaagccagttttcatcaaacatatgaaaaatgaagcctgcctttttgtccccaaattgtaaataggtgtaaatctttttaagcatcaatctcacaatttcaacagttaattgttgaattctcctttccaatacacgatgttttcgttcaacacaaatctgggtagtagtaaaatgttcatcccgtgtgttagggctacagatacatactacgtgctctcataataaattttactgttatgatgtattcattttttaagtaattttccataatttcactgatgctttaagaaaaagagcaacactatgtttctttttaacgttgaaagaaatcataaatatacccaggttcaatggcgctactgatagaactgctgctgaatttggaatgagcacaatgcactagctgtaagaagtcagttttgggtaatgaataattttacttttccctcctgtaataccaatttcatactgtagcagtttatctagtcagttctcctaactttctgtcctttccaattttattcaggcttttcaaaaatcagtgagccatcagatttactttcttcccaaagaaattcaaatatgaatgcttgaaataaataggttatagaaggcaaatcaagtgttatcaggtttaagattaagacagaaacatggtctaataaaaagatgtccaaaattatctagacatcaaatgctagaaagaaaaaagaaaattacttgcaaaactatttaggatatatcatctttcttaaagattgccagctatattcttgaaaaaaagataaaaattttcttgtttaacctgcatgttattttccactataacattaattttacaaatgttgatgtgagagagaagagttagatagtttctgcaaactggcaaacctggctgtgatagtgtttttattcaagttaacctggtgcactttatagattgctagctttaaaattaacagtgtgaacccctgctttaaacccttctcaaagtgcagtcagccaatcaacagtattgccatcacctgggaacttgttagaccccactttgtcaaactcatttcctggtatgacaatgaatctggctacagcaacagggtggtggacctcatggtccacatggcctccaaggagtaacaccccaggaccatcagccccagtgagagcacgagagaaagagagaggccctcagctgcttgggaatccctgccacgctcagtccccaccacactgaggatctcctctcctcacaatttccatgcagaccccctgaagagggaagggcctagggagccccactttgtcatgtaccaccaataaagttccctgtactcagccaaaaaaaaaagaaagaaagaaaaaagaaaaagaaatgcagcatcctgtcttgccccaaacccactgcgtcagaatctgcattttaacaagatccccaggtatgcacattaagttttgagaggcagtactacatataaaatatgcaacagaccacacaaacctgggcccaattgctatttgtcagatacatgtatgtatttattacttataaattccttcatcagatatgtattacgtgcttattactttaaaaagatgaatctgacacatatcctaccctcaaagagatctcagtctaggaagggaaatacaatgtgttcataaataatatagtctaagttagggacttcataaaatgcttgatggaagaagtggcatttattttggacctggaatgagaactgaaagaagatattcaaaagacaagtgatgtagtgatgtagttttgaatacacgaataatctcagggttactttttctatagcttttggtgaatcaagttgtttattcatacatttaataaatatttattcagctcttactattgctataagacagataccattactgctcaggtggtttttacaacctagtggggaagacaagcagataacaagaaatgacacaattcattagtgttactggtagcgttgtgaaggacaaggatggggtgctagaaatccatgtgacggaccagacctaggcaggggtgggagttatggaggaggtttccctgagtaggtaacatctaagctgagaaagatttagttagacaaagagtgaatggcattccaggcaaaggaaacagcatggactaaggtcaaaacaagaagaaatgaacgaaagagcaagttgataaaatggatgtccaataatattccattgttcaactatgcaacatttttcattgcctcccaaattggatcaaagtagcctggtcttcatgcctccagtccttcctctttttaaaaattttatacaactatattaatatagaatttacatactataaaatttcattcaagtatattaggaaatttactgagttgtatagctatcatccatataaggtccgttatgtccctttgcaatgaaccctccattctcactcccagcctcaggcagccaataatctattttctgtctctaggggctggaaacttaggattggaattagttggttgtataataaatttagcttattagagaactgctgaactcttttccaaagcaacaatacaattttacagtttcatcagccttgtgtgagggttcctgttgctccatatccattacaacacttggtattgtcagtccttttgtttatagccattctactgggtgtgaagtggtatctcatttcaccagcccctcttcctaacttatttgccagattccccacttctaaacttgctctatgcccaaccaaagtgaaccccttgctgttttttttttcccctgaggctcgttgatatccccaaattatgcctttcttcattctttgaatgtgttacttgactggatatgtatttttggtgaaggagaggggctggaaattgagagatgaaattggtaggagtacagaaggccgttgacttcctcacaacgtgggacacttccaagtttctcctacaaaccccaccactatacctttccaaatatcttgcctgccatcttggtcacccgtgacctaaattaatacttaggaagctatggagatgctcatgcttcctcaggggagaatgctgtgtgaacttagaaattagcaaaaggggaaatgactacccttgaaattgtaccacagaaaggagcatacattcaaatgatggtgaagtcttattaaaaagactttaagcctcccaatttagaagctggcttgtggtagccaagaaattagagaatgatttgttatttaagagtgaaattgctagtagtcttgaattaattaccataaaaaagctgccgctgtaataaaaagcagagatctggtaaccctgcttcattcactttcttcctcttgatgaaaaccttttaattattttgattttgattagcacttccatcagaaaataggaagaaattaggagcaatttacttggcaaaggtttagtaattaaaaccactgaaatcaatggtttaagtatgtatttgggataaacacatttttaattgttatttttgtcttacccaagtggataacataaagttcattatacaaaaatcaaccagtgcagaaagccgattgggaacaaacaaccattcttgaaccctttgaaaatgtatgcccttgatgaattacttgtcaggtttctacttaagtttaattgttagtacttccacttaaaatagcaaaatgactgtctgcaatttctgttatttcaaactaggttttaaattctggggttgaaagtaagcttaaataactctgagtacttgagtaaacactgcattttttatgatgaggcaagttgtatgagccatttaattactttaattcaatccagagatttgatattttctcctgagttctcacagttggatagtttaaaaatatttctaagattgaattgaatcctgtaagaactataataaaaccatacatctgcctgttttctttctttctctttctctcctttcttttctttctttctttctctttctctcctttctttctttctctttctctcctttctttctttccttcttttctttctttctttcttttctttctttctttctttctttcctttctttcttctttctttctttcttctttcctttctttctttctttctttctttctttctttctttctttctttttctttttctttctttctttctttctttctttttcaagatcgtgctccattgcccaggctggagtgcaagtggcgagatcatggctcactgcaaccttgacctccccaggctcaggtgattctcccacctcagtctcctgagtagctgggagtacaggcatgcaccagcatgtctggctaatttttgtatttttagtagagacagggtctcaccatgtttccagtctgatcttgaactcttgggctcaggcaatcctcccacctcggcttcccaaagtgctgggattacaagtgtaagccaccatgcctggccttgtatttttggataatattgagtgaaatttgcctcaatacataaaaatcctttcaatatgcttcaactctaaaatctttaaaaagctgcttggtttcattattttcacgtggaagcagcattgtcacaaagttttattttgaagactgaattgtatatggagtactgtccaactagaagagaatgaataatcaggaaaagagagactattgacaaataagacttaatggagaagcattgaatttcaaagctgccagagacattagcaattgttcagtttcatctccagatttcttagatgaagaagctgtggcaagccaatttcacaaacccgatctatgatcctcatgctccccactcctctcactcccacaattttgccttgattcaaactttatcgaaaagtgagaaatcacaggtatgagctcactgagcttcccaggcagtcttgccatctacaaacccatgtcattctgtattttcctcttgtttctgacagtgatcctctcatctagtcacactacatccacttatctctggcacttatgtcaaaacaacccctctaggtcctgccttagctctcctgcatatgctttttctttcttcctgtctgttgcctctttcccccagcttataattctcccgcttttattaaaaacatgcacccacagacacacactcacatctggattcccaagtgcgataaccttgtagattcatattttcagatcgttcttagtccacagaatataaaattgattgaatgatggcaaacatctgcagatgacaatcatttacagaaatggcactaaagccatgaagctgaagctgcaggacttatggatctgggctagaagacaggggccatcaaaaatttagcttcagttggaaatcggctcttttagtgcactacatcagatccatgaaagaggaaggaagagttactgctcattgctgcctggagctgtgacttctatgaaattacttaacggggcaaaggaggaagcagatacttccttgcaactaggacgtgagctgagctgatccctgaatcataaatactcaacaagattcggattcaggacccagggtattatggggtacaaccataaaacttctaaatgttggagaaagaataatgagaaagaaaaatgaatctctgaatgaaaatggaactactaaccaaaattccaaatcacgttaatataattattactaagaatgacagcaacaaaatgaataatcagtatatgtcatacctataaagttaaaatctaaaataatttgaagaaatacttaaaaatatttgcaaccctcaaagagataaagaaataatattcataaaattgaaatgacaaactaggggcagggcgcagtggctcacgcctgtaatcccagcactgtgggaggccgaggtgggtggatcacaaagtcaggagatcgagaccatcctggctaacacggtgaaaccctgtctctaataaaaatacaaaaacaaaattagccgggcgtggtggtgggcgcctgtagtcccagctactcaggaggctgaggagggagaatggcgtgaacccgggaggtggagcttgcagtgagccgagatcgcgccactgcactctagcctgggcaacagaatgagactgggtctcaaaacaaacaaacaaacaaacaaacaaactaggaagaatatacagaaatgtaacagaaagtagataggaagaagaatgaagtagaaatgcttgaaattagaaatacggtgattgaaattaaaaccttaacaaagtaaactctagactcacaacaattggagagttggtgattggaaagatgaaccaattaatttacccataacacattagagagaggtgaagaggaaaaaatagctaaatataaaagcacatttaagagacatgtaagatgattaaaagcctccaacatttttcaaaaaagagagtagaggcaatattataggtggaataatgaaaatgataatggctgagaatattaaagaattgagaataaaaaagacaagtggcctcagattgaaactgccatgaaggtctctgtctcaaattctcaactctgcttttgtagtatgaaagcagccgtagacaataagtaaatgaatggacatggctgtgtgtcaatacaacttgatttacaaaaacaggcaggcagcaggctaaattaggctgggaggtcatagtttgacagctcttgatctaaagaataaccattgttggccaggcgcagcggctcatgtctgtaatcacaacactttgggcggccaaggcgagcagatcacttgagcccaggagttcaagaccagcctgcgcaacatggcgaaaccccatctctactaaaagtacaaaaattagccgggcatggtggcaggctcctgtagtcccagctacttaggaggctgaggcaggagaatcgcttgaacctgggaggctgaggttgcagtgagcggagatggtgccactgcactccagcctggatgacagagccagactcggtctcgaaaataaataaagaataacctttgtttacattttcatgtatatgtctccagatgttcctcatatatccatataagtatgtatatatgatgtacataagtgcataagtaaaaatacataagtaattttaaaagaggttatatcatagctgaatcacacatgacttagaccacacttgctcttctgagtacccatttttggacaactctcagtgtccactagcatgtctaaaaaaaatttctcctcctaaaatgctaatgcatgatgtagattttaactacagcttttgaggctcagtggaggagagtgtacatcacactacccaatgcaaagccttttaacagccccttttgctcatctttgttttccttcactgttcctcgccctgcagcaggcagctgacattcacctttcccttccaccctcctctctcagcactggtcctttgcctcctccctcatcccagctctacaaatggcctcagcctgcatattccaaccacccagcaaaacaaacatctagtaactaccgggtcagcaagagaaaatcggaggccctagccatagatagatcaccttatcatttctccagcacattccaggaaggatctcaattcgttctgtcccaatatacctctacatcctttgttttgatgatcacatagaattcattgtatgcatatatcattatttatataactaagcccccaattttgaacaagaggctacatactgaaaatcttttatctaccaagtcttttttttcttacaaacccatccaatacagttgcactgtatccgccaatacagttcatgcaactgtatggaaagcaaactctagaagagtatttgatagctccataagaatattaaactcttatacttctagagcgtaaaaccccagaaaagtattttgtcagaaaaaaatcatgtttttgaaatagtaggttttaaaagaaaacaaagagagttagaagtaagaaaattcaggttatcaggggcttgatatcttttttttgtgactgtagtcaggttacccaggcctttgtggatcaatttctcaaacaaataacagagatgaaaacaactgtcagtagctactgtcacaaaaataatatgataaacatcttttcgtttcctatggctgccataactaattatcacaaacttggtggcttaaaataacagaaatgtattttctcacagctccagagtccagaattccaaaatggaagggtcagcaaggctgcacgccctcaaaacactcttggagagaatcttttcttgcttcatccagcttctgatggctctaggcaatcccccgcttgtcactgcatcactccggtctctgcccccatcttcaaatgaccttcctctgtgtccctgtcttctcttctgtctcttataaggacacttgtcattgtacagtatttagggtccacatagataatccaggaggatctcattttaagatccttaacttcattacatctgtacagatcctttgtccaaattaaggtaatgttcacaggttctgtgggttaggatgtggacatatcattttgaggcccaccattcaatgcactacaattttctttgtaagtgttctgagaacccaggaagaataagtaaatcctctgattcaatcaaaaatgagcagaatgtaaaccaaaaatactagaagatatcctttttcctaggcactggcatacgtttcaatagtatctctaattacagatgtatttacacttctaagtgtcagaaatgaagattattatgacaaatttaaaatttagtaacttgtttttaaactggtatttttgtttttttaagcgatcatctcagtccacattggaacgatctgaacagcagatcagggctgcttctagtttggaggaactacttcgaattactcactctgaggactggaagctgtggagatgcaggctgaggctcaaaagttttaccagtatggactctcgctcagcatcccatcggtccactaggtttgcggcaactttctatgacattgaaacactaaaaggtaggtgtgtggatgtggagacaaattctttctctttattagatagtgacaaacacacttactttctccaaaagtctgcgtagggcagacacgtgtcagagggagaatgaaagtcggtctttgatttccagtattagtgcagaatcttgattttttaatgtttacttcacagagaaatatattcaatatgattttgagataaaaaacacaaaagaacatctcaaaatatagaaataaatttaactcaaggatgtgggggcaaagaaaacccaggaagactattgttctcaatagaaaaacaatcatcaggtttacttagaaaataaaacctggggattcatccacaaggagtattctactgccatacatacatagacaaaaaccaaagatggccaggcatggtggctcatgcctgtaatcccagcactttgggaggccaagaacggcagatcgcttgagcccaggagtttgaaaccagcctgggcaacatgacgagaccccatctctacaaaaaaatagaaaaaaatagctgaacattgtggtacgtgcctgtattcccagctacttgggaggctgaggtgggaggatcggctgagcccaggaggtcgaggctgcagtgagccatgatcatgctactgcactccagcctgggcaacagagcaagatcctgtctcaaaaaaaccaccccctccccgaaccaatagattaggtatagcttttttttttatttctgcaaagttgtgtgattttttagtaaaagtgaaaagtaaaagttagacactgagttgtaatattgggtactggtattgctaggagaataatgaagggagaaaattctcaagacaaaatgatcaaaactccagactagaaaataacataatttgaaataaggataatgatcgttccctagtaacgtatgaagattctttaaaagaaaatcaggccaggtgtggtggatgacacctgtaatcccagcactttgggaggttgaggcaggtggatcacctgaggtcaggagttcgagaccagcctgaccaacatggtgaaaacccatctctactaaaaatacaaaattagccaggcatggcggtgcatgcctgtaatcccaactacttgggaggctgaggcaggagaatcacttgaacccaggaggcggaggttgcagtgagccaagattgcaccattgcactccaacctgggcaacaagagtgaaactccatcttaaaaaacaaaaaaacaaaacaaaacaaaacaaaaaaacaaagaaagaaagaaagaaaaccagtgtgagtaggtactgtcataatgaataaaatgcttgtcaagtaaagttctgtggtttctgattaggcacttaattttttgatgtcatgtcaaaacaacacaagaagctgctacagcattgctgatctagcattctagatttgattaacatgattacctggtaactgactatatatatagcataattcaaattaaccactaggccaaaactatttttttctttctacctaaaattgtatttgttttttcccatttgtaaaaagatgttggggttgcacagacctctgttgttggctgtggggagagctgtgcatagatggggacatattctttggtagcaccttgggcatgagtgtgaagaggattcttagtgttcatgtgtatgactgtgtgtctaagtgagttgatgtggtaggaaccatagcctcgagctcacttcagacagaaatttgaagctctagatgtttctatgtggtgaattaatatagccttcatgagaacaaagggttggcacctcatctagaggtcaaaggccttaaccagattacctgactgaaggcctgaggtgaacctggagctatttcatgaacatgaacgttaccataaaaccaagactaggtgatctaaaaaaagtcaatgacattgacattttctaaggagaaaaccattaaaatatcacggaatttgcaaaccctatgaatttatctcgtaatttctaggggatcatctgaagttatttactaagttagaagcagtcaataatgaaatcagcatgttacaccaattagaatttgttatcaactctcccttgtggatttcaaggtaatttcctgaggcagagcagtcctgctgggaagcagtaaagaatagtagagttatgaagcctttaatcagtgatgttggtcataattgcatatgattttgattaaaagcttaccactccaatttcaaaacttagttttataaaaagagaaaaagcaaatggaaagcaacctttaagtagaattttaaattgggaatattttcataggttggtttcttgttttttcaaggattcatgattaattatagtgaattaaataataaccataataatacttaattgagtaatttatctctcatgtgttcagccttcaggctttttatataaatattaataatcagaaatttttaaaaaggtttcttgggggctgggcacagtggctcacgcctttaatcccagcactttgggaggctgaggtgggcggatcacaaggttaagagatcaagaccagcctggccaacatggtgaaactccgtctctactaaaaatacaaaaattagctgggcatggtggcgcatacctgtaatcccagctacttgggaggctgaggcaggagaatcgcttgaacccaggaggtggaggttgcagtgagccgagatcgcgccgctgcactccagcctggcaacagagtgagaccccgtctcaaaaaaaaaaaaaaaagtttctcaggatagaatgttttattatgaggaaaaaaataaaaaaaaacaaagtttaggtagactgtgtagtataatgcagtgctccagacaactcatattatgttttcagtgattgaagaagcaacatatgaaaaaaattggtattaagggatgaaaaaggagaaaggaatggagaagatgttataagggaataatttagggactagggtcacatctcaaatggtaatattgtatcagtatacttcaagcagacgttttctctattccttctattcccctatatgggaattcaggataatctcaggagagttcttgaaaatgcagtaaaaataaaggagagtttgcctattgttgcataacacattaccacaaaacttagctacttaaaacaatatttatctcagtttctgtgggccagaaatgctgacatggcctagatcagtttttctgcttcagatgtctctggaggctgcagttaagatgttggcttgggctgcaggcatcttagggcacagctgaagcagagtgtgctttcaagttcagtcagctgttgtttgcaggactcaattcctcacaggctgttggactgagggtcttagttcctcgctggctattggccagaggctgcctcaagttccttgtcgtgtggacctttctaacatggcggcaaactaacacaagaactgaaaaccaaacaccgcatgttctcactcataagtgggagttgaacaatgagaacacatatacacaaggaggggaacatcacaaaccagggcctgttggtgggtggggggcaaagggagggagagcattaggacaaatacctaatgcatgcggggcttgaaacctagatgacgggttgacgggtgcagcaaaccaccgtggcacatgcatacctgtgtaacaaacctgcacgttctgcacatgtatcccagaacttaaagtaaaataagctaaaaaaaaaaaaaaaaaaaaaagcctgcaagtggagaaggaggagagagagagagagagtgtgtgtgagaaagtgagacagagtaagaaagaagggagcttgcaataagtagaaacaagactgcaatcttttttaacttcatcatggaagtggtatcccatcacttttgctgtattctcttcataagaagcaagttactaggttcagctcacacacgaggggaaggcatttacacaagggcatgactatcaggagatggggaccactgggggttagtttcaaagctgcctaccacaagagattttcaccagcaccacaaccccacacataataaataaactctacagttccatggcaagctacaaggaagtctttgtgttgtctttatcataaaattgaatctttcccccaaaacacctgtagaaaggctatgcagcattaagtatcaaagggtcaaaatctaatttaaaaaataaattatgagagaaaagcaagtactgttttacaagaaagtatataatttttttattcccataggcttctttttttgttaccttcaaattaactatggtcaaaggattgctcattccagtaataagaacaggcttatttcatcatttacataaatatcagtatcgggcacttgcaaatgagaaaactctgatttgagtaaggattagtttcacttcaatttccatttatgcgtttgccaagtttaaatcctactgtagttacttaagcaaccaacagaaacatatttcttgatgatgctaaaacctacctacacctggctttaaagcagaagaaatgctatccagctgtatcctataaattgcttgataaataatatttacatgttatttctttacacgcttctatttacttccctattaaccagcttctccagatgtattcagtgtaattatgtacaggacatggtgttctacctcaaagggaaataaaatacttatattctacaaggtatggtataaatgggaaagagcacagagattggttgtaacttctctgcaaacaatctttggttaaaggactgacaaaaaatatccatctagtaaaagaaacaagcagtagaaatgtgaaaatgactgtgttcagcataaccctggcacatgttggcacaccaggaccattccacctgctagccccagtgagctttctttctctctgcagttatagatgaagaatggcaaagaactcagtgcagccctagagaaacgtgcgtggaggtggccagtgagctggggaagagtaccaacacattcttcaagcccccttgtgtgaacgtgttccgatgtggtggctgttgcaatgaagagagccttatctgtatgaacaccagcacctcgtacatttccaaacaggtataaggacatcggcaagcctgccgtctctaaagccctgatgataatagtgttgatagctacaacaaccttgttgctaaacactgtactaaatgctttatgtgcataatcgcatttaatctttgaaacaaatcaagagggtattttatgctcctttatagatgaggaaactgaggctcagagaggtaacttacttatccaagtttacacggctgataaatagcagagctgggattcaaacccaggtctgtgggaggccagagcctgaactcttatcagttattgtctctctgatgctatgatgtcaagactcagaaaaccatatggaagttactaggacaggatgttaaaaggaatgaagatagctgatggcaggttctgtgttgctcaaatggagtgattgagaaaaatttaatgaaggttgtgggcagaattggggaaagagggatgggacagtgaagcacctgaagctagcaaaaagggtgagatttccccacccttcgactgaggagacaaggggagggagcagttatgggaacccagagggaaagcggagaagagggtttctggactggccactgtcaactcttagcctggcagggagtaggggcaggggctgggagaggcaagagggtttatagatgtagcccatggagggcagcgtcctggggcacagagcctgatggggaaggaaggggagaggatggtgtctctggaggggcaaagagagaatatctagcacaaaagacatttggaaataattctgcagtccccatgaaagaaataattcagccctcttcatcttataaatttccctttgcttagtaggtaagttttcctttctctggttaccatgtttttaataaatgtcgcatatgagagcagtagtaacaaacttgggaaagcaatactaaaaaactgtacatcaaactacattatttttggtatctgttgcaaattctttgaatgttgatatacttatttaattgtcagtttgcctatatggtttattctccttttaactgcaaaaagaggtagtacaagaaaattacatgcactgaatatatccatgttaggtaattttcttaatgctgatttgttttgttaatagatttacttatccttaattttgttcctccaccctctaaaatatcctttaaactgcagagtttctttttctaaattcttttagagaatcttggagcttgtgtgtattttaacctctactatttgacaattaggaaaaaaaaatgacccaagtagggctaagcatcaattctgagtagaaaaaaagcttgcataacgtaagagggtttagttcatgatcatgtgattccctagagcatagccaaaaaattgtgcaagaagatgaagtttatgcaaagtaaacactacaaaaacactctcactgagactcatggaagttccattacatattgagatgtcagaataaacacaaccttaatggattgcttccacttaatagatagttgagtactttattttgactgctgtactcaacaaatgattaatttcatacaatgtacttaagtgtaagtgtacagcagtttttcttccaaatatgcatttttgaacattttaatagtagttttttaaaaactatctctcgccccaaagttatggactatttggcaaaccacctcttagaaacaaagtgaacaaatgaatactctatgtagtaaggactacatggaatggtgattgaatagacaatgcattaaaatcaacttcaaactcatccacacatcatagaaccactcaagaaagttgtgtaatctctctgtacatctgtttcttcacctgtaagatggggataataaaaacccaccccataatgttgttataaggggtaaatgagttaacatgaaagcacttacaacagggcctggcctacggaaagcgtagaaagaatgatatacatgttagctataattatttgtttgggcatgatgatcttgtatcagtcagctattaatacacagtgctacgtaacaaacacactaaaactcagtggttccaaacaacaatgatttactctcacttatgtatctgaggttcagttagtttagggtggattcagctgggcttgactctaagctgcagtgtgagtccaagtcaacttctatgtttcccatcgcttggaccagcaagcctgccggattatgttcttttcatggctatagcataagtttgagaaaacaagccccataaaacatgcacagttcaaatttgtacttctgtcatgtctgctaacatcccactagccaaagaaagtgacatggccaaataaaaagtcaagagacaggaaactatatttcttcaatagagatggtgtgagaagggatgaataaatagtttgaataataatctattctaataaaatcctaaagaaactgcatagctttaatctcatttaacccttacgatttacactcaaatttaaagcaggagcagggattaacagtaccattttacaagagtatcaatgatcaaaaagttaaaagatttgaccaaacttaaacacttcataaagttagatgagcctgtttagttccattcttaatggacaacttggctaaagtcattgccgtaaatgacaaaggcaaaaattcagactagaacaactttaaaaatgatatataaaattaaaaaaatatattgtggttatctttctctgctgtagctctttgagatatcagtgcctttgacatcagtacctgaattagtgcctgttaaagttgccaatcatacaggttgtaagtgcttgccaacagccccccgccatccatactcaattatcagaagatccatccagatccctgaagaagatcggtaagcacttttgtttttttttttatactggattatgcttatttttgccttgccaaaactgtgtgtagaggatttttcattaatgtagagttatcaatttatcttcaaattattcatattttagcttctaacctgaacctactggtaataactggcaaatacatatttttattagatgttagatatatattgtggtaggaccaaaacgctcagtggtatgagcttgtcatgtctacttgtagacacgtttgttcttaatatgcatagtctactgcaggtgtaaaaccgctgtaacctcaaatttagcacatgttccagaacaagcattaaataaaacttatttcaggctgtttgtatatttacatcctgaaatgagagaaaacaaagaagattcctggggtcattggggagtgacaaaactagcagcacgtgagttttgcaactttctaatctttcccccttaagattaccaaatggaaaacccttattttaaattaaaatgacttaaaattaatttggctttgaaattctcttgagattaattttgtgattatttataagacaaacgacaaaaccaaaggtaaggatcacttatttgaagaaaaaaaaggatttaatataaagaaacaagtaaagggtaactgaatgaaaagatcattagttagatacttagactttgcaaaagtaaagcaataaatatattgtgtgagtggcaagtaaaagagtaagctggtgattagttaacattgaaccaagaagacacctcccgcctctctccagcagaaaagaaaacttgtagaaaagcaacatttattctcaagatgttcctgctgttctggccaatgcttttatctttattttaaagaaaataatcttaggggccgggcacggtggctcacacctgtaatcccagcagtatgggaggctgaggcgggcagatcacgaggtcaggagattgagaccatcctggctaacacggtgcaactccgtctctactaaaaatataaaaaaaaattagccgggtgtggtggtgggtgcctgtagtcccagttacttgggaggctgaggcaggagaatggcatgaacctgggaggtggagcttgcagtgagccgagatcgcgccactgcactccagcctgggcaacagagggagactccgtcaaaaaaaaaagaaaagaaaataatcttaggaggtatgttagaacatatttaattttcgtaaataaactgttgacagctataatttgcatagttttaacatataccttcttaagaagattacaatttccaaaattacagtttagtttctaaacatttccacgtagaatatttataattacagaatcactatctagtaagatgcagttcataaatacaaattaagctcctttaaaatcttttttttttttgagacggagtttcgctcttgttgccccggctggagtgcaatggcgagatctcggctcactgcaacctccgcctcccaggttcaagtgattctcctgcctcagccttccaagtagctgggattacaggcatgtgccgccacgcccggctaattttgtatttttcagtagagatggggtttctccatattagtcaggctggtctcgaactcccgacctcaggtgatctgcccgcctcggactcccaaagtgctgggattacaggcgtgagccaccgcacctggcccgctcctttaaaatcttaactcttctcacatccttatcattttgtggtgagaacatttgaaatttactctcttagcaatttggaaatataaaatacattattattattgactatagttaccatgctgtgcaatagatctcaaaaccttatttctccaaactgagtataaaaagcaaaaaataaatttaaaaaatcttaactattatctactcaggaatttatttaatgttccaaagttttgattatccttgaaagcttttaaatctggttcattgttttcttttcctagctgttcccattccaagaaactctgtcctattgacatgctatgggatagcaacaaatgtaaatgtgttttgcaggaggaaaatccacttgctggaacagaaggtaatgatagtagtagtaaaataataacagtaataataaaagtagcaacaatagcagcaaccgttattgagtacttagtatgaccagacaatgttgtaaatcttgtatatgttttaactcatttaattctcacaacaaccctgtaatgtactattgttatttctttttttacaattacaaaatgggcacaccaagatatcgagtaatttcctcaaggtcacacagctgagagtgatagaagtggtcagattccagaaccctctgtaccataatcatatagtaagtccatcaatgcatcactctgctttttaatctcaaagaaaagcccagagtggttggagcatcctgaaacactgaaattgaaaggggatgttaaacttgaatgaaagctgcttcagaactaaatactagtcaactgcagtttactaatttatttgtataaaagtctcacaggaacataaagtaattttggacttggtttctgtcagctgcatcatatgaaaacacgccagtaatttgaaaaaagaaatggagaataagagaaaatttttctggaattagggcaaagcaaaagcaaaatatggctattggtctaaggggagctgggagcaaaatgagatatagtcaaattgtcattgctcataatccgtaattctgtgactttgggtgatgaacatttgcttgaaaatgaatgcattttaatgtattttccagagagctttacatggttccaccaaaaaaaaaaaagaaagaaaaaaaaagtcacaagtagtcatgcagttttaaccttgcttgttttaaactataatctataagcaagaacagtaagggctaaactctaagaaatctgtcctataaactgtaaatagcaacctactctccattcttctgcctctcagcttccttctaaatgttttcacgaaagctcagcccagagcatgtggggaaatttaatatttatgtggtttaaatgcccatgccgatcttgaatgttctttacacccttcccaccaagtgttcagccatcctctaccagaacatacatcagttatttggagactcgccatccagtgaggcagcaccaaggggtgggcacactcctgttgttatactgaaatgaaatctctctccagaacagaccagactgcccaatggaatacaataagagtcatatatgtaactcacattttacattaaaaagataaaaagaaacaagtgaaatttatcttaatatattttatttaatccaatctatccaatgtactatcatttcaacatgcaatcaatataaaaaatttatgagctagcctacattctttgtgctaagtctttgaaatccagtgtgtgttgtacacttacagcacatctcaatttagactctctatttcatgcccaatagtcacatatggcccatagctaccttgttggacagcccagctcaagagcatcaactcattagttcaggttttaccctatagaaccatgtaaaacaaatctaattctttctccatgtgactcatgttctaaaagtgttagaaaatttttgtggggttggccgggaatggtggctcatgcctgtaatcctagcactttgggaggccgagatgggaggatcacttgaggttgggagtttgaaaaccagccgggccggccgggcgcggtggctcacgcctgtagtcccagcactttgggaggccgaggcgggcggatcacgaggtcaggagattgagaccatcctggctaaaacggtgaaaccccgtctctactaaaaatacaaaaaaaaaattagccgggcgtagtggcgggcgcctgtagtcccagctacttgggaggctgaggcaggagaatggcgtgaacccgggaggcggagcttgcagtgagccgagatcccgccactgcactccagcctgggcaacagagcgagactccgtctcaaaaaaagaaaaaaaaaaaaaagaaaaccagccgggccaacatggcgaaatcccatctctactactactaaaaaaaaaaaaaaaaaaaaaaaaaaaaaaaaaaaaatagctgggcatggtgatgtgcgcctgtagtcccagctactcaggaggctgaggcatgagaatctcttgaacctgggaggcagaggttgcagtgagccgaggtcatgccaccgcactcgggcctggatgacagagtgagactctgcctccaaaaaaagaaagaaagaaagaaagagagaaagagaaaaagaaaagaaaagaaagagagagagagagaaagaaagaaagaaaagaaaagaaagagagagaaagaaagaaagaaaagaaagaaaaagaaaggaaggaaggaaggatagaaagaaagaaagagaaagaaagtaagttactgtgggaagggcaatatacttagagcttaaaggctctagctgaggatttcctggcacaaagcctctgagacagttttgtacggaggaggtttgtaggcaggcacaaggcattaaagggtaaagagagaggcagcagaccacagcgcagttgctaagaggcatcagcctaagccaatgggaagttgaagctgggaacccctgcgggggtaagtcttaaatctaggtgaagaggctgagccctgtagaccgttcattggctgccttggagaggggatgtagccttaggagaggcagcttatttctgctggagataattcttgggaaggcactcagccagtacacgtgtgtagagggtggtaagaagaatagggaagaagagaagtgctgttctaagcagcgggtatatgagcactcagggctggaggtgagagaacatactggaagaagttcagcatggtggggatataatgggtggggacataatggggaaggggctggttagatgtgagagaagaagctggacaggctcacaggggcaaagcagaaggaccttgtaattcttgcatgggagcttggatgtgatactaaggacaaagggaaaccacacaactggctaaagcaggagagtgacagtacccattagaattttaacaaaatcatatcagcaacagtgtagaagaggatgtgttgactcggggcagggaaggaggcaggaaaccttttgggaagttgtagcaatgatgtaagtgagaggcgcagggtggactggatcacaattgtttctcattctcatctcctataagtccccaatgtggatcaagttcacattcatttctccagtggccccatcaaattgatgggatttactgagcttactgctcactatactttttttccgcacatgtgactgttaagccaactgccttttctacagtgacttctcttgcccagatgagcacatttaggttagtgaatccaagtctaatttaattgagtcttgttagagtcaggtcattgctctaaattgttaaaacaaacgatatacacaaacacacacacacacaaaagaataaattgaggaggtcccaattctgtattttaaaatacttaatatatcccttccttcttgaagagagctacaatttcaagaatttattttgaaaaaattctatcagtttattgataaaaatggtaaaaggaacaaagctgagaacagaacatatcatcagactctctagggacggaaatcaatacataatacttcaagatatcaccctcagctacttgctgttccaccaccagttctcttgcatccagtttttgtttcttttaacttggctataaggatgtgagcacagactctgccaaacagcctgctgaagttctgcaaacaccttgtggattgtgtttccctgaacaaccctgtccaacaatggccttgggcctgtctgaagtattcttagtgaacttctgctgccacctagtgatcattgcgaatttttaaaaagcctctttatcctttaacaagttactcttgtcttaccccaaagcggcatctgcctcactggcatatgacttacagagctcacattttccctctccacaaagttcaaaatggagacttctcagatttagccttccagcacccattctcaaacgtcgtgcattacagaaaagtttaaactataaagttgaaccgcacgagattctcattttgatatgtcattaaagtcagatattggcaagaacatatggtttaacccaatggcttggaatgctggatgggattcccagaagctccatacatcggcctgcttcaggacccttttattacaccaaataaacccaacaaacatccatcgagtgcctattttatatcagaacaatgagacctgctccttctccttcaggacattttacttaatgggggaaacatacaagtaaacagacaaatgtaatcagtgcaagaaagaatcggacagcaatatgcacaggataaggacacttagctaaacctgcagacattgggaaagatgtcagggaaaagggatggcagaaggaaagacaaggccaaaggcatgggactgggaggcactggaatatcagggcaacagaaagtgctgtcatttggtataaatggaacacacaggatatatgaaagcaagaaacagaagatgagtctgtgaggttactatgatccagttcatggagggccttgtatgtcctggtgggaaaattggtttttattgtgggaagggaaccttttaatgcattcaaagcagtggaatgaagtgatttggtttgcatttgttaatcatgtgaagaagaataggttggagggataaaacttgtggtggtgagatgagtgacagagcgacagccatctacaaaagaaacacaaggtacagactgaattgtgggagtggtagtggggatggaaaataaagaacaaatttagagaggcagaactgagtggacatgatgctcagacttaccagagcaggtgagtcaagaatgatgtcaccattccctaaatgaggcaaactgggagagaagcagatttggggagaaaactactaaacatgtacgtccctccaaaaccttcaagaatgctaaagggacagagtcaagttcttccaaagtttctgtctcttccatttattttgcaatgaatttcaacttgttaatcagaaatggatttggagtagtagctattcaattgttttatacaccttctagaagaaatatttgtcagatgagtatgtcaaaaacttctcagaccctcccctttacttgaatgtatcttccagcagatgttggtggaatcaaagttcattattactcctatatcttttatactagtgttatgatctgcagtgaggacatgcattgctattgctacgcctggcctggaatgtctgaggtgtatttctacaacaccaattattttgtgtgtctctccttttaatctccaccaaaaaatggagacagctagattcataacccttagacatcctatattttattactaatacttggttgtggaagtttgcattctaaacaagtcatcaacataaaaatctctaaaaatattttatgaaaaatattcagcttatgatattttaaaaatcacaaacctaagaaaacacacaaacctgtgtttgtattgtgaaatcagaggttaatcttcctcaccctgtgaaaaaattaggggcataaatctataggaaggagattgggtgaatccaagttacttacggatgacataaaagatacaatcaactttggtgatccaattgccacactacaactatctgaccaacacgtttctgtttctctttagaccactctcatctccaggaaccagctctctgtgggccacacatgatgtttgacgaagatcgttgcgagtgtgtctgtaaaacaccatgtcccaaagatctaatccagcaccccaaaaactgcagttgctttgagtgcaaagaaagtctggagacctgctgccagaagcacaagctatttcacccagacacctgcaggtaaatgccttgagttgtcttgcctttactcatgacatttaacgtagatgccattttaatttggtgggattccttagtaagctaatttttccccttggtgcctgagtcccttttggataatagaacagaggtttagcagctaaggaataagcaagagtataccgagtcatgattaatcatgaaaataagaaaatcaatcctgcctgttattatgtgtgtagagctttttttttttagacggagtctcgctctgtctccaggctggagtgcagtggcgtgatctgggctcactgcaacctccgtctctctggttcaagggagtctcctgcctcagcctcccaagtagctgggattacaggcacgtgccaccacacccagctaatttttgtatttcagtagagacggggtttcaccatgttggccaggatagtcttgatctcctgacctcatgatccacccgtctcggcctcccaaagtgctgggattacaggcatgagccaccgcgcccacccggggtttagagctcttaaacaacaatgaaattggtaaaatttaagcagttattaggatattgcttaataataatattttaggaaggggaggtttcagatcatcaacctgtttagttcaatctctcattgtttatgtctatatatgtttgtttttttctttaatggagggaatatcattggatttatatagcaagtaatttattcatgaatagaacacttggaggttactgattcacttcagtagattttgaatccatgtgggataaccatgcaggattttatactgacattttaaatacatgtctggaaaacttaatcaaatcagagcagagttattcttttgaatccagtcattgattctgaattctcatctttattttcttttgcaacagctgtgaggacagatgcccctttcataccagaccatgtgcaagtggcaaaacagcatgtgcaaagcattgccgctttccaaaggagaaaagggctgcccaggggccccacagccgaaagaatccttgattcagcgttccaagttccccatccctgtcatttttaacagcatgctgctttgccaagttgctgtcactgtttttttcccaggtgttaaaaaaaaaatccattttacacagcaccacagtgaatccagaccaaccttccattcacaccagctaaggagtccctggttcattgatggatgtcttctagctgcagatgcctctgcgcaccaaggaatggagaggaggggacccatgtaatccttttgtttagttttgtttttgttttttggtgaatgagaaaggtgtgctggtcatggaatggcaggtgtcatatgactgattactcagagcagatgaggaaaactgtagtctctgagtcctttgctaatcgcaactcttgtgaattattctgattcttttttatgcagaatttgattcgtatgatcagtactgactttctgattactgtccagcttatagtcttccagtttaatgaactaccatctgatgtttcatatttaagtgtatttaaagaaaataaacaccattattcaagccatataa

SEQ ID NO: 84 - DNA, 1725 bp, Homo sapiens
  source 1..1725: mol_type = other DNA
ctatggagtttgcataacaaacgtttggcagctcgctctcttacactccattaacaagctgtaacatatagctgcaggttgctataatctcattaatattttggaaacttgaatattgagtatttctgagtgctcattccccatatgccagccacttctgccatgctgactggttcctttctctccattattagcaattagcttcttaccttccaaagtcagatccaaggtatccaagatactagcaaaggaatcaactatgtgtgcaagttaagcatgcttaatatcacccaaacaaacaaagaggcagcatttcttaaagtaatgaagatagataaatcgggttagtcctttgcgacactgctggtgctttctagagttttatatattttaagcagcttgctttatattctgtctttgcctcccaccccaccagcacttttatttgtggagggttttggctcgccacactttgggaaacttatttgatttcacggagagctgaaggaagatcatttttggcaacagacaagtttaaacacgatttctatgggacattgctaactggggcccctaaggagaaaggggaaactgagcggagaatgggttaaatccttggaagcaggggagaggcaggggaggagagaagtcggaggagtataaagaaaaggacaggaaccaagaagcgtgggggtggtttgccgtaatgtgagtgtttcttaattagagaacggttgacaatagagggtctggcagaggctcctggccgcggtgcggagcgtctggagcggagcacgcgctgtcagctggtgagcgcactctcctttcaggcagctccccggggagctgtgcggccacatttaacaccatcatcacccctccccggcctcctcaacctcggcctcctcctcgtcgacagccttccttggcccccaccagcagagctcacagtagcgagcgtctctcgccgtctcccgcactcggccggggcctctctcctcccccagctgcgcagcgggagccgccactgcccactgcacctcccagcaaccagcccagcacgcaaagaagctgcgcaaagttaaagccaagcaatgccaaggggaggggaagctggaggcgggctttgagtggcttctgggcgcctggcgggtccagaatcgcccagagccgcccgcggtcgtgcacatctgacccgagtcagcttgggcaccagccgagagccggctccgcaccgctcccgcaccccagccgccggggtggtgacacacaccggagtcgaattacagccctgcaattaacatatgaatctgacgaatttaaaagaaggaaaaaaaaaaaaaaacctgagcaggcttgggagtcctctgcacacaagaacttttctcggggtgtaaaaactctttgattggctgctcgcacgcgcctgcccgcgccctccattggctgagaagacacgcgaccggcgcgaggagggggttgggagaggagcggggggagactgagtggcgcgtgccgctttttaaaggggcgcagcgccttcagcaaccggagaagcatagttgcacgcgacctggtgtgtgatctccgagtgggtgggggagggtcgaggagggaaaaaaaaataagacgttgcagaagagacccggaaagggccttttttttggttgagctggtgtcccagtgctgcctccgatcctgagcctccgagcctttgcagtgcaa

SEQ ID NO: 85 - protein, 159 aa, synthetic construct
  REGION 1..159: note = DHFR destabilizing sequence
MISLIAALAVDYVIGMENAMPWNLPADLAWFKRNTLNKPVIMGRHTWESIGRPLPGRKNIILSSQPSTDDRVTWVKSVDEAIAACGDVPEIMVIGGGRVIEQFLPKAQKLYLTHIDAEVEGDTHFPDYEPDDWESVFSEFHDADAQNSHSYCFEILERR

SEQ ID NO: 86 - DNA, 483 bp, synthetic construct
  misc_feature 1..483: note = DHFR destabilizing sequence
  source 1..483: mol_type = other DNA
ggtaccatcagtctgattgcggcgttagcggtagattacgttatcggcatggaaaacgccatgccgtggaacctgcctgccgatctcgcctggtttaaacgcaacaccttaaataaacccgtgattatgggccgccatacctgggaatcaatcggtcgtccgttgccaggacgcaaaaatattatcctcagcagtcaaccgagtacggacgatcgcgtaacgtgggtgaagtcggtggatgaagccatcgcggcgtgtggtgacgtaccagaaatcatggtgattggcggcggtcgcgttattgaacagttcttgccaaaagcgcaaaaactgtatctgacgcatatcgacgcagaagtggaaggcgacacccatttcccggattacgagccggatgactgggaatcggtattcagcgaattccacgatgctgatgcgcagaactctcacagctattgctttgagattctggagcggcgataa

SEQ ID NO: 87 - DNA, 474 bp, synthetic construct
  misc_feature 1..474: note = Destabilizing domain
  source 1..474: mol_type = other DNA
atcagtctgattgcggcgttagcggtagattacgttatcggcatggaaaacgccatgccgtggaacctgcctgccgatctcgcctggtttaaacgcaacaccttaaataaacccgtgattatgggccgccatacctgggaatcaatcggtcgtccgttgccaggacgcaaaaatattatcctcagcagtcaaccgagtacggacgatcgcgtaacgtgggtgaagtcggtggatgaagccatcgcggcgtgtggtgacgtaccagaaatcatggtgattggcggcggtcgcgttattgaacagttcttgccaaaagcgcaaaaactgtatctgacgcatatcgacgcagaagtggaaggcgacacccatttcccggattacgagccggatgactgggaatcggtattcagcgaattccacgatgctgatgcgcagaactctcacagctattgctttgagattctggagcggcga

SEQ ID NO: 88 - protein, 112 aa, synthetic construct
  REGION 1..112: note = FKBP12 destabilizing
MGVEKQVIRPGNGPKPAPGQTVTVHCTGFGKDGDLSQKFWSTKDEGQKPFSFQIGKGAVIKGWDEGVIGMQIGEVARLRCSSDYAYGAGGFPAWGIQPNSVLDFEIEVLSVQ

SEQ ID NO: 89 - DNA, 10 bp, Homo sapiens
  source 1..10: mol_type = other DNA
ccggcccgac

SEQ ID NO: 90 - DNA, 17 bp, synthetic construct
  source 1..17: mol_type = other DNA
aaataaaatacgaaatg

SEQ ID NO: 91 - skipped

SEQ ID NO: 92 - protein, 20 aa, Homo sapiens
MYRMQLLSCIALSLALVTNS

SEQ ID NO: 93 - protein, 640 aa, Homo sapiens
AKAAAIGIDLGTTYSCVGVFQHGKVEIIANDQGNRTTPSYVAFTDTERLIGDAAKNQVALNPQNTVFDAKRLIGRKFGDPVVQSDMKHWPFQVINDGDKPKVQVSYKGETKAFYPEEISSMVLTKMKEIAEAYLGYPVTNAVITVPAYFNDSQRQATKDAGVIAGLNVLRIINEPTAAAIAYGLDRTGKGERNVLIFDLGGGTFDVSILTIDDGIFEVKATAGDTHLGGEDFDNRLVNHFVEEFKRKHKKDISQNKRAVRRLRTACERAKRTLSSSTQASLEIDSLFEGIDFYTSITRARFEELCSDLFRSTLEPVEKALRDAKLDKAQIHDLVLVGGSTRIPKVQKLLQDFFNGRDLNKSINPDEAVAYGAAVQAAILMGDKSENVQDLLLLDVAPLSLGLETAGGVMTALIKRNSTIPTKQTQIFTTYSDNQPGVLIQVYEGERAMTKDNNLLGRFELSGIPPAPRGVPQIEVTFDIDANGILNVTATDKSTGKANKITITNDKGRLSKEEIERMVQEAEKYKAEDEVQRERVSAKNALESYAFNMKSAVEDEGLKGKISEADKKKVLDKCQEVISWLDANTLAEKDEFEHKRKELEQVCNPIISGLYQGAGGPGPGGFGAQGPKGGSGSGPTIEEVD

SEQ ID NO: 94 - DNA, 1983 bp, Homo sapiens
  source 1..1983: mol_type = other DNA
atgtaccggatgcagctgctgagctgtatcgccctgtctctggccctggtcaccaattctgccaaagccgcggcgatcggcatcgacctgggcaccacctactcctgcgtgggggtgttccaacacggcaaggtggagatcatcgccaacgaccagggcaaccgcaccacccccagctacgtggccttcacggacaccgagcggctcatcggggatgcggccaagaaccaggtggcgctgaacccgcagaacaccgtgtttgacgcgaagcggctgatcggccgcaagttcggcgacccggtggtgcagtcggacatgaagcactggcctttccaggtgatcaacgacggagacaagcccaaggtgcaggtgagctacaagggggagaccaaggcattctaccccgaggagatctcgtccatggtgctgaccaagatgaaggagatcgccgaggcgtacctgggctacccggtgaccaacgcggtgatcaccgtgccggcctacttcaacgactcgcagcgccaggccaccaaggatgcgggtgtgatcgcggggctcaacgtgctgcggatcatcaacgagcccacggccgccgccatcgcctacggcctggacagaacgggcaagggggagcgcaacgtgctcatctttgacctgggcgggggcaccttcgacgtgtccatcctgacgatcgacgacggcatcttcgaggtgaaggccacggccggggacacccacctgggtggggaggactttgacaacaggctggtgaaccacttcgtggaggagttcaagagaaaacacaagaaggacatcagccagaacaagcgagccgtgaggcggctgcgcaccgcctgcgagagggccaagaggaccctgtcgtccagcacccaggccagcctggagatcgactccctgtttgagggcatcgacttctacacgtccatcaccagggcgaggttcgaggagctgtgctccgacctgttccgaagcaccctggagcccgtggagaaggctctgcgcgacgccaagctggacaaggcccagattcacgacctggtcctggtcgggggctccacccgcatccccaaggtgcagaagctgctgcaggacttcttcaacgggcgcgacctgaacaagagcatcaaccccgacgaggctgtggcctacggggcggcggtgcaggcggccatcctgatgggggacaagtccgagaacgtgcaggacctgctgctgctggacgtggctcccctgtcgctggggctggagacggccggaggcgtgatgactgccctgatcaagcgcaactccaccatccccaccaagcagacgcagatcttcaccacctactccgacaaccaacccggggtgctgatccaggtgtacgagggcgagagggccatgacgaaagacaacaatctgttggggcgcttcgagctgagcggcatccctccggcccccaggggcgtgccccagatcgaggtgaccttcgacatcgatgccaacggcatcctgaacgtcacggccacggacaagagcaccggcaaggccaacaagatcaccatcaccaacgacaagggccgcctgagcaaggaggagatcgagcgcatggtgcaggaggcggagaagtacaaagcggaggacgaggtgcagcgcgagagggtgtcagccaagaacgccctggagtcctacgccttcaacatgaagagcgccgtggaggatgaggggctcaagggcaagatcagcgaggcggacaagaagaaggttctggacaagtgtcaagaggtcatctcgtggctggacgccaacaccttggccgagaaggacgagtttgagcacaagaggaaggagctggagcaggtgtgtaaccccatcatcagcggactgtaccagggtgccggtggtcccgggcctgggggcttcggggctcagggtcccaagggagggtctgggtcaggccccaccattgaggaggtggattaa

SEQ ID NO: 95 - protein, 512 aa, synthetic construct
  REGION 1..512: note = Ranibizumab
MYRMQLLSCIALSLALVTNSEVQLVESGGGLVQPGGSLRLSCAASGYDFTHYGMNWVRQAPGKGLEWVGWINTYTGEPTYAADFKRRFTFSLDTSKSTAYLQMNSLRAEDTAVYYCAKYPYYYGTSHWYFDVWGQGTLVTVSSASTKGPSVFPLAPSSKSTSGGTAALGCLVKDYFPEPVTVSWNSGALTSGVHTFPAVLQSSGLYSLSSVVTVPSSSLGTQTYICNVNHKPSNTKVDKKVEPKSCDKTHTGKRKRRGSGEGRGSLLTCGDVEENPGPMYRMQLLSCIALSLALVTNSDIQLTQSPSSLSASVGDRVTITCSASQDISNYLNWYQQKPGKAPKVLIYFTSSLHSGVPSRFSGSGSGTDFTLTISSLQPEDFATYYCQQYSTVPWTFGQGTKVEIKRTVAAPSVFIFPPSDEQLKSGTASVVCLLNNFYPREAKVQWKVDNALQSGNSQESVTEQDSKDSTYSLSSTLTLSKADYEKHKVYACEVTHQGLSSPVTKSFNRGEC

SEQ ID NO: 96 - protein, 20 aa, synthetic construct
  REGION 1..20: note = Ranibizumab leader sequence
MYRMQLLSCIALSLALVTNS

SEQ ID NO: 97 - protein, 127 aa, synthetic construct
  REGION 1..127: note = Ranibizumab heavy variable
EVQLVESGGGLVQPGGSLRLSCAASGYDFTHYGMNWVRQAPGKGLEWVGWINTYTGEPTYAADFKRRFTFSLDTSKSTAYLQMNSLRAEDTAVYYCAKYPYYYGTSHWYFDVWGQGTLVTVSSASTK

SEQ ID NO: 98 - protein, 102 aa, synthetic construct
  REGION 1..102: note = Ranibizumab heavy constant
VFPLAPSSKSTSGGTAALGCLVKDYFPEPVTVSWNSGALTSGVHTFPAVLQSSGLYSLSSVVTVPSSSLGTQTYICNVNHKPSNTKVDKKVEPKSCDKTHTG

SEQ ID NO: 99 - protein, 18 aa, synthetic construct
  REGION 1..18: note = Ranibizumab heavy constant
EGRGSLLTCGDVEENPGP

SEQ ID NO: 100 - protein, 104 aa, synthetic construct
  REGION 1..104: note = Ranibizumab light chain
DIQLTQSPSSLSASVGDRVTITCSASQDISNYLNWYQQKPGKAPKVLIYFTSSLHSGVPSRFSGSGSGTDFTLTISSLQPEDFATYYCQQYSTVPWTFGQGTKV

SEQ ID NO: 101 - protein, 110 aa, synthetic construct
  REGION 1..110: note = Ranibizumab light constant
EIKRTVAAPSVFIFPPSDEQLKSGTASVVCLLNNFYPREAKVQWKVDNALQSGNSQESVTEQDSKDSTYSLSSTLTLSKADYEKHKVYACEVTHQGLSSPVTKSFNRGEC

SEQ ID NO: 102 - DNA, 1539 bp, synthetic construct
  misc_feature 1..1539: note = Ranibizumab
  source 1..1539: mol_type = other DNA
atgtaccggatgcagctgctgagctgtatcgccctgtctctggccctggtcaccaattctgaggtgcagctggtggaatctggcggcggacttgttcaacctggcggctctctgagactgagctgtgccgcttctggctacgacttcacccactacggcatgaactgggtccgacaggcccctggcaaaggccttgaatgggtcggatggatcaacacctacaccggcgagccaacatacgccgccgacttcaagcggagattcaccttcagcctggacaccagcaagagcaccgcctacctgcagatgaacagcctgagagccgaggacaccgccgtgtactactgcgccaagtatccctactactacggcaccagccactggtactttgacgtgtggggacagggcacactggtcacagtgtctagcgcctctacaaagggccccagcgttttcccactggctcctagcagcaagtctaccagcggaggaacagccgctctgggctgtctggtcaaggactactttcccgagcctgtgaccgtgtcctggaattctggcgctctgacaagcggcgtgcacacctttccagctgtgctgcaaagcagcggcctgtactctctgagcagcgtcgtgacagtgccaagcagctctctgggcacccagacctacatctgcaatgtgaaccacaagcctagcaacaccaaggtggacaagaaggtggaacccaagagctgcgacaagacccacaccggcaagcggaagagaagaggctctggcgaaggcagaggcagcctgcttacatgtggcgacgtggaagagaaccccggacctatgtatagaatgcagctcctgtcctgcattgccctgagcctggctctcgtgaccaacagcgacatccagctgacacagagccccagcagcctgtctgcctctgtgggagacagagtgaccatcacctgtagcgccagccaggacatctccaactacctgaactggtatcagcaaaagcccggcaaggcccctaaggtgctgatctacttcacaagcagcctgcactccggcgtgcccagcagattttctggctctggcagcggcaccgacttcaccctgaccatatctagcctgcagcctgaggacttcgccacctactactgccagcagtacagcaccgtgccttggacatttggccagggcacaaaggtggaaatcaagcggactgtggccgctcctagcgtgttcatctttccacctagcgacgagcagctgaagtctggcacagcctctgtcgtgtgcctgctgaacaacttctaccccagagaagccaaggtgcagtggaaagtggacaatgccctgcagagcggcaacagccaagagagcgtgacagagcaggactccaaggatagcacctatagcctgagcagcaccctgacactgagcaaggccgactacgagaagcacaaagtgtacgcctgcgaagtgacccaccagggcctttctagccctgtgaccaagagcttcaaccggggcgaatgttaa

SEQ ID NO: 103 - protein, 732 aa, synthetic construct
  REGION 1..732: note = Bevacizumab
MYRMQLLSCIALSLALVTNSEVQLVESGGGLVQPGGSLRLSCAASGYTFTNYGMNWVRQAPGKGLEWVGWINTYTGEPTYAADFKRRFTFSLDTSKSTAYLQMNSLRAEDTAVYYCAKYPHYYGSSHWYFDVWGQGTLVTVSSASTKGPSVFPLAPSSKSTSGGTAALGCLVKDYFPEPVTVSWNSGALTSGVHTFPAVLQSSGLYSLSSVVTVPSSSLGTQTYICNVNHKPSNTKVDKKVEPKSCDKTHTCPPCPAPELLGGPSVFLFPPKPKDTLMISRTPEVTCVVVDVSHEDPEVKFNWYVDGVEVHNAKTKPREEQYNSTYRVVSVLTVLHQDWLNGKEYKCKVSNKALPAPIEKTISKAKGQPREPQVYTLPPSREEMTKNQVSLTCLVKGFYPSDIAVEWESNGQPENNYKTTPPVLDSDGSFFLYSKLTVDKSRWQQGNVFSCSVMHEALHNHYTQKSLSLSPGKRKRRGSGEGRGSLLTCGDVEENPGPMYRMQLLSCIALSLALVTNSDIQMTQSPSSLSASVGDRVTITCSASQDISNYLNWYQQKPGKAPKVLIYFTSSLHSGVPSRFSGSGSGTDFTLTISSLQPEDFATYYCQQYSTVPWTFGQGTKVEIKRTVAAPSVFIFPPSDEQLKSGTASVVCLLNNFYPREAKVQWKVDNALQSGNSQESVTEQDSKDSTYSLSSTLTLSKADYEKHKVYACEVTHQGLSSPVTKSFNRGEC

SEQ ID NO: 104 - protein, 20 aa, synthetic construct
  REGION 1..20: note = Bevacizumab leader sequence
MYRMQLLSCIALSLALVTNS

SEQ ID NO: 105 - protein, 127 aa, synthetic construct
  REGION 1..127: note = Bevacizumab heavy variable
EVQLVESGGGLVQPGGSLRLSCAASGYTFTNYGMNWVRQAPGKGLEWVGWINTYTGEPTYAADFKRRFTFSLDTSKSTAYLQMNSLRAEDTAVYYCAKYPHYYGSSHWYFDVWGQGTLVTVSSASTK

SEQ ID NO: 106 - protein, 322 aa, synthetic construct
  REGION 1..322: note = Bevacizumab heavy constant
VFPLAPSSKSTSGGTAALGCLVKDYFPEPVTVSWNSGALTSGVHTFPAVLQSSGLYSLSSVVTVPSSSLGTQTYICNVNHKPSNTKVDKKVEPKSCDKTHTCPPCPAPELLGGPSVFLFPPKPKDTLMISRTPEVTCVVVDVSHEDPEVKFNWYVDGVEVHNAKTKPREEQYNSTYRVVSVLTVLHQDWLNGKEYKCKVSNKALPAPIEKTISKAKGQPREPQVYTLPPSREEMTKNQVSLTCLVKGFYPSDIAVEWESNGQPENNYKTTPPVLDSDGSFFLYSKLTVDKSRWQQGNVFSCSVMHEALHNHYTQKSLSLSPG

SEQ ID NO: 107 - protein, 104 aa, synthetic construct
  REGION 1..104: note = Bevacizumab light variable
DIQMTQSPSSLSASVGDRVTITCSASQDISNYLNWYQQKPGKAPKVLIYFTSSLHSGVPSRFSGSGSGTDFTLTISSLQPEDFATYYCQQYSTVPWTFGQGTKV

SEQ ID NO: 108 - protein, 110 aa, synthetic construct; identical to SEQ ID NO: 101
  REGION 1..110: note = Bevacizumab light constant

SEQ ID NO: 109 - DNA, 2199 bp, synthetic construct
  misc_feature 1..2199: note = Bevacizumab
  source 1..2199: mol_type = other DNA
atgtaccggatgcagctgctgagctgtatcgccctgtctctggccctggtcaccaattctgaggtgcagctggtggaatctggcggcggacttgttcaacctggcggctctctgagactgagctgtgccgcttctggctacaccttcaccaactacggcatgaactgggtccgacaggcccctggcaaaggccttgaatgggtcggatggatcaacacctacaccggcgagccaacatacgccgccgacttcaagcggagattcaccttcagcctggacaccagcaagagcaccgcctacctgcagatgaacagcctgagagccgaggacaccgccgtgtactactgcgccaagtatccccactactacggcagcagccactggtactttgacgtgtggggacagggcacactggtcacagtgtctagcgcctctacaaagggccccagcgttttcccactggctcctagcagcaagtctaccagcggaggaacagccgctctgggctgtctggtcaaggactactttcccgagcctgtgaccgtgtcctggaattctggcgctctgacaagcggcgtgcacacctttccagctgtgctgcaaagcagcggcctgtactctctgagcagcgtcgtgacagtgccaagcagctctctgggcacccagacctacatctgcaatgtgaaccacaagcctagcaacaccaaggtggacaagaaggtggaacccaagagctgcgacaagacccacacctgtcctccatgtcctgctccagaactgctcggcggaccttccgtgttcctgtttcctccaaagcctaaggacaccctgatgatcagcagaacccctgaagtgacctgcgtggtggtggatgtgtcccacgaggatcccgaagtgaagttcaattggtacgtggacggcgtggaagtgcacaacgccaagaccaagcctagagaggaacagtacaacagcacctacagagtggtgtccgtgctgaccgtgctgcaccaggattggctgaacggcaaagagtacaagtgcaaggtgtccaacaaggccctgcctgctcctatcgagaaaaccatcagcaaggccaagggccagcctagggaaccccaggtttacacactgcctccaagccgggaagagatgaccaagaaccaggtgtccctgacctgcctcgtgaagggcttctacccttccgatatcgccgtggaatgggagagcaatggccagccagagaacaactacaagacaacccctcctgtgctggacagcgacggctcattcttcctgtacagcaagctgacagtggacaagtccagatggcagcagggcaacgtgttcagctgcagcgtgatgcacgaggccctgcacaaccactacacccagaagtctctgagcctgtctcctggcaagcggaagagaagaggctctggcgaaggcagaggcagcctgcttacatgtggcgacgtggaagagaaccccggacctatgtatagaatgcagctcctgtcctgcattgccctgagcctggctctcgtgaccaacagcgacatccagatgacacagagccccagcagcctgtctgcctctgtgggagacagagtgaccatcacctgtagcgccagccaggacatctccaactacctgaactggtatcagcaaaagcccggcaaggcccctaaggtgctgatctacttcacaagcagcctgcactccggcgtgcccagcagattttctggctctggcagcggcaccgacttcaccctgaccatatctagcctgcagcctgaggacttcgccacctactactgccagcagtacagcaccgtgccttggacatttggccagggcacaaaggtggaaatcaagcggactgtggccgctcctagcgtgttcatctttccacctagcgacgagcagctgaagtctggcacagcctctgtcgtgtgcctgctgaacaacttctaccccagagaagccaaggtgcagtggaaagtggacaatgccctgcagagcggcaacagccaagagagcgtgacagagcaggactccaaggatagcacctatagcctgagcagcaccctgacactgagcaaggccgactacgagaagcacaaagtgtacgcctgcgaagtgacccaccagggcctttctagccctgtgaccaagagcttcaaccggggcgaatgttaa

SEQ ID NO: 110 - protein, 451 aa, synthetic construct
  REGION 1..451: note = Aflibercept
MYRMQLLSCIALSLALVTNSSDTGRPFVEMYSEIPEIIHMTEGRELVIPCRVTSPNITVTLKKFPLDTLIPDGKRIIWDSRKGFIISNATYKEIGLLTCEATVNGHLYKTNYLTHRQTNTIIDVVLSPSHGIELSVGEKLVLNCTARTELNVGIDFNWEYPSSKHQHKKLVNRDLKTQSGSEMKKFLSTLTIDGVTRSDQGLYTCAASSGLMTKKNSTFVRVHEKDKTHTCPPCPAPELLGGPSVFLFPPKPKDTLMISRTPEVTCVVVDVSHEDPEVKFNWYVDGVEVHNAKTKPREEQYNSTYRVVSVLTVLHQDWLNGKEYKCKVSNKALPAPIEKTISKAKGQPREPQVYTLPPSRDELTKNQVSLTCLVKGFYPSDIAVEWESNGQPENNYKTTPPVLDSDGSFFLYSKLTVDKSRWQQGNVFSCSVMHEALHNHYTQKSLSLSPG

SEQ ID NO: 111 - protein, 104 aa, Homo sapiens
SDTGRPFVEMYSEIPEIIHMTEGRELVIPCRVTSPNITVTLKKFPLDTLIPDGKRIIWDSRKGFIISNATYKEIGLLTCEATVNGHLYKTNYLTHRQTNTIIDV

SEQ ID NO: 112 - protein, 101 aa, Homo sapiens
VLSPSHGIELSVGEKLVLNCTARTELNVGIDFNWEYPSSKHQHKKLVNRDLKTQSGSEMKKFLSTLTIDGVTRSDQGLYTCAASSGLMTKKNSTFVRVHEK

SEQ ID NO: 113 - protein, 226 aa, Homo sapiens
DKTHTCPPCPAPELLGGPSVFLFPPKPKDTLMISRTPEVTCVVVDVSHEDPEVKFNWYVDGVEVHNAKTKPREEQYNSTYRVVSVLTVLHQDWLNGKEYKCKVSNKALPAPIEKTISKAKGQPREPQVYTLPPSRDELTKNQVSLTCLVKGFYPSDIAVEWESNGQPENNYKTTPPVLDSDGSFFLYSKLTVDKSRWQQGNVFSCSVMHEALHNHYTQKSLSLSPG

SEQ ID NO: 114 - DNA, 1542 bp, synthetic construct
  misc_feature 1..1542: note = Aflibercept
  source 1..1542: mol_type = other DNA
atgtaccgaatgcagctgctgctgctgatcgcactgagcctggcactggtgaccaacagcgaggtgcagctggtggagagcggaggaggactggtgcagccaggaggaagcctgcgactgagctgtgcagcaagcggatacgacttcacccattacggaatgaactgggtgcgacaggcaccaggaaagggactggagtgggtgggatggatcaacacctacaccggagagccaacctacgcagcagacttcaagcgacgattcaccttcagcctggacaccagcaagagcaccgcatacctgcagatgaacagcctgcgagcagaggacaccgcagtgtactactgtgcaaagtacccatactactacggaaccagccattggtacttcgacgtgtggggacagggaaccctggtgaccgtgagcagcgcaagcaccaagggaccaagcgtgttcccactggcaccaagcagcaagagcaccagcggaggaaccgcagcactgggatgtctggtgaaggactacttcccagagccagtgaccgtgagctggaacagcggagcactgaccagcggagtgcataccttcccagcagtgctgcagagcagcggactgtacagcctgagcagcgtggtgaccgtgccaagcagcagcctgggaacccagacctacatctgtaacgtgaaccataagccaagcaacaccaaggtggacaagaaggtggagccaaagagctgtgacaagacccatctgcgaaagcgacgagcaccagtgaagcagaccctgaacttcgacctgctgaagctggcaggagacgtggagagcaacccaggaccaatgtaccgaatgcagctgctgctgctgatcgcactgagcctggcactggtgaccaacagcgacatccagctgacccagagcccaagcagcctgagcgcaagcgtgggagaccgagtgaccatcacctgtagcgcaagccaggacatcagcaactacctgaactggtaccagcagaagccaggaaaggcaccaaaggtgctgatctacttcaccagcagcctgcatagcggagtgccaagccgattcagcggaagcggaagcggaaccgacttcaccctgaccatcagcagcctgcagccagaggacttcgcaacctactactgtcagcagtacagcaccgtgccatggaccttcggacagggaaccaaggtggagatcaagcgaaccgtggcagcaccaagcgtgttcatcttcccaccaagcgacgagcagctgaagagcggaaccgcaagcgtggtgtgtctgctgaacaacttctacccacgagaggcaaaggtgcagtggaaggtggacaacgcactgcagagcggaaacagccaggagagcgtgaccgagcaggacagcaaggacagcacctacagcctgagcagcaccctgaccctgagcaaggcagactacgagaagcataaggtgtacgcatgtgaggtgacccatcagggactgagcagcccagtgaccaagagcttcaaccgaggagagtgttga

SEQ ID NO: 115 - RNA, 10 nt, synthetic construct
  source 1..10: mol_type = other RNA
  variation 1..10: note = A residue can be repeated up to four thousand nine hundred ninety times
aaaaaaaaaa
